United States Patent Application Publication US 2022/0132862 A1 - sequence listing, part 2

SEQ ID NO: 1 - DNA, 6090158 bp, Pseudomonas sp. (residues 2,030,054-4,060,106 of 6,090,158)
  misc_feature (1)..(40): n is a, c, g, or t
  misc_feature (32029)..(32267): n is a, c, g, or t
  misc_feature (266259)..(266298): n is a, c, g, or t
  misc_feature (308738)..(308777): n is a, c, g, or t
  misc_feature (366282)..(366321): n is a, c, g, or t
  misc_feature (485794)..(485833): n is a, c, g, or t
  misc_feature (490635)..(490674): n is a, c, g, or t
  misc_feature (609891)..(609930): n is a, c, g, or t
  misc_feature (617018)..(617057): n is a, c, g, or t
  misc_feature (696285)..(696324): n is a, c, g, or t
  misc_feature (735386)..(735425): n is a, c, g, or t
  misc_feature (864787)..(864826): n is a, c, g, or t
  misc_feature (902670)..(902709): n is a, c, g, or t
  misc_feature (910376)..(910415): n is a, c, g, or t
  misc_feature (954467)..(954506): n is a, c, g, or t
  misc_feature (987109)..(987148): n is a, c, g, or t
  misc_feature (1037321)..(1037360): n is a, c, g, or t
  misc_feature (1067930)..(1067969): n is a, c, g, or t
  misc_feature (1154621)..(1154660): n is a, c, g, or t
  misc_feature (1209285)..(1209324): n is a, c, g, or t
  misc_feature (1258184)..(1258223): n is a, c, g, or t
  misc_feature (1260899)..(1260938): n is a, c, g, or t
  misc_feature (1279229)..(1279238): n is a, c, g, or t
  misc_feature (1302655)..(1302694): n is a, c, g, or t
  misc_feature (1340253)..(1340292): n is a, c, g, or t
  misc_feature (1358997)..(1359036): n is a, c, g, or t
  misc_feature (1453806)..(1453845): n is a, c, g, or t
  misc_feature (1479493)..(1479532): n is a, c, g, or t
  misc_feature (1587608)..(1587647): n is a, c, g, or t
  misc_feature (1645941)..(1645980): n is a, c, g, or t
  misc_feature (1662443)..(1662482): n is a, c, g, or t
  misc_feature (1686349)..(1686388): n is a, c, g, or t
  misc_feature (1713675)..(1713714): n is a, c, g, or t
  misc_feature (1735046)..(1735085): n is a, c, g, or t
  misc_feature (1744847)..(1744886): n is a, c, g, or t
  misc_feature (1807249)..(1807288): n is a, c, g, or t
  misc_feature (1817496)..(1817535): n is a, c, g, or t
  misc_feature (1898481)..(1898520): n is a, c, g, or t
  misc_feature (1926437)..(1926476): n is a, c, g, or t
  misc_feature (1942893)..(1942932): n is a, c, g, or t
  misc_feature (1980753)..(1980792): n is a, c, g, or t
  misc_feature (1989098)..(1989137): n is a, c, g, or t
  misc_feature (2063947)..(2063986): n is a, c, g, or t
  misc_feature (2138416)..(2138455): n is a, c, g, or t
  misc_feature (2162477)..(2162516): n is a, c, g, or t
  misc_feature (2203782)..(2203821): n is a, c, g, or t
  misc_feature (2282262)..(2282301): n is a, c, g, or t
  misc_feature (2301355)..(2301394): n is a, c, g, or t
  misc_feature (2329748)..(2329787): n is a, c, g, or t
  misc_feature (2378305)..(2378344): n is a, c, g, or t
  misc_feature (2468632)..(2468671): n is a, c, g, or t
  misc_feature (2483870)..(2483909): n is a, c, g, or t
  misc_feature (2493763)..(2493802): n is a, c, g, or t
  misc_feature (2517815)..(2517854): n is a, c, g, or t
  misc_feature (2534247)..(2534286): n is a, c, g, or t
  misc_feature (2574050)..(2574089): n is a, c, g, or t
  misc_feature (2615359)..(2615398): n is a, c, g, or t
  misc_feature (2624399)..(2624438): n is a, c, g, or t
  misc_feature (2654015)..(2654054): n is a, c, g, or t
  misc_feature (2739383)..(2739422): n is a, c, g, or t
  misc_feature (2755327)..(2755366): n is a, c, g, or t
  misc_feature (2762142)..(2762181): n is a, c, g, or t
  misc_feature (2798011)..(2798050): n is a, c, g, or t
  misc_feature (2836580)..(2836619): n is a, c, g, or t
  misc_feature (2884822)..(2884861): n is a, c, g, or t
  misc_feature (2896718)..(2896757): n is a, c, g, or t
  misc_feature (2940973)..(2941012): n is a, c, g, or t
  misc_feature (2956379)..(2956418): n is a, c, g, or t
  misc_feature (3002822)..(3002831): n is a, c, g, or t
  misc_feature (3014311)..(3014350): n is a, c, g, or t
  misc_feature (3021511)..(3021550): n is a, c, g, or t
  misc_feature (3056166)..(3056205): n is a, c, g, or t
  misc_feature (3102840)..(3102879): n is a, c, g, or t
  misc_feature (3198223)..(3198262): n is a, c, g, or t
  misc_feature (3267524)..(3267563): n is a, c, g, or t
  misc_feature (3345707)..(3345746): n is a, c, g, or t
  misc_feature (3403966)..(3404005): n is a, c, g, or t
  misc_feature (3440934)..(3440973): n is a, c, g, or t
  misc_feature (3482847)..(3482886): n is a, c, g, or t
  misc_feature (3566433)..(3566472): n is a, c, g, or t
  misc_feature (3600655)..(3600694): n is a, c, g, or t
  misc_feature (3632605)..(3632644): n is a, c, g, or t
  misc_feature (3669417)..(3669456): n is a, c, g, or t
  misc_feature (3687113)..(3687152): n is a, c, g, or t
  misc_feature (3721720)..(3721759): n is a, c, g, or t
  misc_feature (3743749)..(3743788): n is a, c, g, or t
  misc_feature (3798737)..(3798776): n is a, c, g, or t
  misc_feature (3870931)..(3870970): n is a, c, g, or t
  misc_feature (3924159)..(3924168): n is a, c, g, or t
  misc_feature (3931557)..(3931596): n is a, c, g, or t
  misc_feature (3971507)..(3971546): n is a, c, g, or t
  misc_feature (3977953)..(3977992): n is a, c, g, or t
  misc_feature (4019490)..(4019529): n is a, c, g, or t
  misc_feature (4042513)..(4042552): n is a, c, g, or t
  misc_feature (4067134)..(4067173): n is a, c, g, or t
  misc_feature (4120022)..(4120061): n is a, c, g, or t
  misc_feature (4177779)..(4177818): n is a, c, g, or t
  misc_feature (4205043)..(4205082): n is a, c, g, or t
  misc_feature (4380475)..(4380514): n is a, c, g, or t
  misc_feature (4498798)..(4498837): n is a, c, g, or t
  misc_feature (4626845)..(4626884): n is a, c, g, or t
  misc_feature (4637477)..(4637516): n is a, c, g, or t
  misc_feature (4660957)..(4660996): n is a, c, g, or t
  misc_feature (4681587)..(4681626): n is a, c, g, or t
  misc_feature (4729600)..(4729639): n is a, c, g, or t
  misc_feature (4748301)..(4748340): n is a, c, g, or t
  misc_feature (4768545)..(4768584): n is a, c, g, or t
  misc_feature (4844471)..(4844510): n is a, c, g, or t
  misc_feature (4893964)..(4894003): n is a, c, g, or t
  misc_feature (4913205)..(4913244): n is a, c, g, or t
  misc_feature (4936516)..(4936555): n is a, c, g, or t
  misc_feature (4948055)..(4948094): n is a, c, g, or t
  misc_feature (4959550)..(4959589): n is a, c, g, or t
  misc_feature (5043487)..(5043526): n is a, c, g, or t
  misc_feature (5105732)..(5105901): n is a, c, g, or t
  misc_feature (5188411)..(5188450): n is a, c, g, or t
  misc_feature (5293493)..(5293532): n is a, c, g, or t
  misc_feature (5369254)..(5369293): n is a, c, g, or t
  misc_feature (5392057)..(5392096): n is a, c, g, or t
  misc_feature (5511631)..(5511670): n is a, c, g, or t
  misc_feature (5656594)..(5656633): n is a, c, g, or t
  misc_feature (5799509)..(5799548): n is a, c, g, or t
  misc_feature (5938008)..(5938047): n is a, c, g, or t
  misc_feature (5979513)..(5979552): n is a, c, g, or t
atccctatttgcaacggcactggcccgtgctggggctgcccgagggggcaaaggtgctggtgccgttgtgtggcaaaagtctggacttggtatggctcgagagccaggggtacccggtaatgggcgtggagctgtcggagcaggcggtggaggcgttcttcagcgagcaggggcttgtgccgcacgtcactcagaagggcgccttcaaggtttaccaggcgggccagatcgaactgtggtgtggcgatttcttcagtctggatgctgaggcagtggccggttgcagcgccgtttatgaccgcgcggcattaattgccttaccgccgctgatgcgtgcgcaatacgccgagcacctgaatgccttgctgccctcaggctgccaggggttgctgattactcttgattacgaccaagctcagaaggccggtccgccttttgctgtttcgaacgaggaggtgcaggtgctgctggggccatattggatgttggagcggctggaggagcgggacatcctgggggagagcgggaagttcctgcaggacggtgttacccgccttgaagagcgtgcttatcggctgacccggcgctgaaagggcttttgcttttgtaggagcgagggggacgcctagttcttgctcgcgaaagacgtcaacgataacgcgtgcttggtgaatgaacgcggcgcctgttagtttttcgcgggcaagctcgctcctacagaggagggtgagaaatcagcatgcacaaaaaaggggcgatcatatcgccccttgtcgagtcatctggctatcagccccggcgacgcagtgcgtcaatccgctcttccagcggcgggtggctcatgaacaagcgagccaggccctgcttgatgccgccgttgatgccgaaggcggtcaggctgtccggcatatgcaccggcaggccctgttcggagcgcaggcgttgcagcgcgccgatcattgcgctggtgcccgccaggcgtgcgccggcttcatctgcgcggaactcgcgtttgcgcgagaaccacatcacgatggcgctggccaggaagcccaggaccaactcggcgaaaatggtcgccacgaagtaggcaatgccacggccttcttcgttcttgaagatgaccttgtcgacaaagttgccgatgatccgcgcaaagaacatcacgaaggtgttcaccacgccctgtaccagtgccagggtgaccatgtcgccgttggctacatggccgatctcgtgggccagcaccgccttgacttcatcgggcgaaaaccgctccagcaggccctggctcacggccaccagcgcgtcgttcttgttccagccggtggcaaaggcgttggcctcataagcaggaaaaatccccacttcgggcattttgatgcctgcttcttgagacaactgctccacggtttgcatcagccattgttcatggcgagtgcggggttgagtgatgatctgggtgctggtgctcatcttcgccatccacttggagatgaacagcgagaacagcgaaccggcaaaaccaaagaccgcacagaaaatcagcagctgattgaggttcagatcaaccccattggccgccatgaacccgttgaagccaaaaaggctcagggtgacgctggcaatcagtacgaccgccaggttagtggccaagaacagcaggatgcgcatcatggttgtagaattctcctcatgcttaatatgtcgctcactgcggggtatataaggtgcggcatggggtgattcaaccgggggactatttcaaactgtgtcctacacctcgggcgtagggccttgaagggattttcccacctgtattgtcagccgtgatcgacccgatgctaccccgtcgccccgtgattatagggggtacgtcatcggcagaggccaaatgaagtacaaccgcaagtaagtgacacagaagtgttgccagataatcgctgtacgaccctttgtgagtcgtacagcgtcaattgccttactggcgataggacttcaggaagttgccgatgcgaccaatggccatttccaggtcatccacgcgtggcaaggtcactacgcgaaagtgatccggccacggccagttgaaggcggtgccttgcacgaccagcagtttttctgacagcagcaggtcgagcacgaacttctcatcgttgaggatcgggcagactttcgggtcgatccgcgggaatgcatagagcgcacccatgggcttcacacagctcacgcctggaatggcattgagcaattcccaggtgcggttacgctgctccagcaagcggccttggggcaggatcaggtcattgatgctctggtaaccgcccagggcggtctggatcgcgtgctggcttggcacgttggcgcacaggcgcatgttggccagcatatcgatgccttcgatgtagctttgcgcgttgtgcttgggcccggagatggcgatccagccggagcggaaacccgccacgcggtaggacttggacaggccgttgaaggtcaggcacagcaggtccggggccagggaggcggtgcagatatgtacggcgtcatcgtagaggatcttgtcgtagatctcgtcggagaacaccaccaggttgtgctggcgcgccagctccagcatgcccagcagcacttctttggaataaacggcgcctgtcgggttgttcgggttgatgatcaccagggctttggtgttgggggtgatcttggccttgatgtcggccaggtccgggaaccagtcggcgccttcatcacacaggtaatgcaccgggtggccgcccgccagggtcacggcggcggtccatagagggtaatccggggctggtaccaagacttcatcgccattgttgagcaatgcctgcatggacatcacgatcaactcggacacgccgttgcccaggtagatgtcctcgatgccgacgccttcgacctgcttctgctggtagtactgcatcaccgccttgcgcgcgctgaacaggcccttggagtcgctgtaaccctgggcggtcggcaggttgcggatcacatcctggaggatttcgtccggcgcctcgaaaccaaacggcgccgggttgccaatgttcagcttgaggatgcgatggccttcctcttccaggcgtttggcgtgcttgagcactgggccgcgaatgtcgtagcagacgttggcgagcttgttcgatttgctgacctgcatggcgatgtgatcctgaaaatgaacgatcccgacggcgtaggcactaccgtagggtgaagcctgcacggcccgcacccataaatacgtttgaatgccggtggcgcgggtgccagactggcgttttgaagaggcgcaatcatacgtgccgcctgatccatggaaaagacacagatcagggtttttcagttgccgaggtgtaccgatggataagttgcagaaaactgtagacgaatggaaggcgatgctcgatccggagcagtacaacgtgtgccgtctcaagggtaccgagcgaccgttcagcggcaagtacaacgccaccaagaccgacggcgtctaccactgcatctgctgcaacgagccgctgttcgattccaaggccaagtttgattccggctgcggctggcccagcttctatgagccgattgccgatagcgcaatggtcgagatccgcgacgtcagtcacggcatgattcgcaccgaagtcacctgcgccaaatgtgatgcacacctggggcatgtgttcccggacggtccaccgccgacgggcctgcgctactgcatcaactcggtatgcctggatctggtgccgcgctaggcttgcatagcccccgtaggagcgcgcttgctcgcgaaaaacgtcaacgataacgcggggcgcctgaatgaacgcggcgtctgggagtttttcgcgagcaagctcgctcctacacgaataaggttcttctttcgctgacttgaggtattgccatgagcgactccctgctgagcatcccttgcaccaccatcaagggtgaacaaaaaaccttggccgattttgccggcaaggccattctggtggtcaacaccgccagcaaatgcggcttcaccccgcagtacaagggccttgagcagctttggcagcaatacaaggaccagggcctggtagtgctcggctttccctgcaaccagttcggcaagcaggagccgggcaacgaaggtgcgatatccgagttctgcgagctgaacttcggcgtcagttttccgctgttcaagaaaatcgacgtcaatggcagcgatgcccacccgctgttcgtgcagttgaaaaaacaggcaccgggtctgctgggctccaagaacatcaagtggaacttcaccaagtttctcatcggccgtgatggccagcaggtcaagcgttttgcgccaaccaccaagccccaggacttgacccaggagatcgaagccctgctcaaatgacctacgcggtgcgggtacccgtcagaggctggtggtcttcggtacccacagttccagcaaggcgttgagttcttcccgtcgaaacggcttggccaggtagtcgttcatacccgccgcccggcaacgctcgcgttcttcggccatcgcattggcggtcaaggccacgatgggcaagtccggccaacgcccgctgcggcgaatttgtcggctggcctcatagccatccatcacgggcatgttgcagtccatcaacaccatatcgaagcgctggtcctccagcagcctgagggcttcgccaccgtgggccgcgacgatcacctcgcacccgagcttgctgagcatgcccttggccaccagttggttgaccgcgttgtcctccaccaacaggatgcgcgcacggtgcgcaagcggtgcggcctctatctgtaccgggtcgagcaccagttgcgcgtcgctgcgcaggttgcgttgcaagatctggtacagcgcgttacggctcaacgggcgtgcctgttgttgtagcggcgccagggccgcgacttcagcgctgggcaaaaagttgccgtaggcggtgaccagcagaatcggcgcgctgatgcccgggcgcaagcggaacaagcactcagggcagtcggtgatcaacaggtcgggcgccagcccgctcaaatcgtcgtcctgggaataacagcgcggcgtcagcccccaagagggcaatagcgtggtgagcagctccgtcagcccgccgccggcgttggtgatggcgatcacctcgccggtgagcggtgcatagcgtgtggcaggcaaatgcgccggcagcggtagatcggcgcagaactggctgccaaagcccacctccgaactgatactcaagcgaccttgcatcgcttcgcacaggttatgggtcaacgccaggcccaatcccgttccaccaaactggcgggtgatgccagcgccggcctgggtgaacggttggaaaattttcacctgggcttcctgggcgatgccaatgccggtgtcgcacacttcgatgctgacccggccttccaaggcgcgcaggcgcacatcgacgcggccgaagcgggtgaacttcaaggcattggagagcaagttgctgacgatttgccgcacacgggtcgggtcaccgatcacctgggcgggaaattgcgggtcgatcaggcaggtcagctccacactcggcgcagcgttttgcgacagcaggttggcggtgtcctccaccagggagcccaggtcgaaggggatatgctccagttccaactggccggcgtcgaatttggacaggtcgagaatatcgttgagcaactccaccagcactttgcctgagtcatgggcaatggacagttgctggcgctgttcggcggtcagcgggctgtccagtgacagggcaatcatgcccagcagcccgttgagtggcgtgcggatttcatggctcatattggccaggaatgccgcccgcgcctgggccatgcccagcgccgtcattttcgccgcctccagctcatcgttggactggctcaagcgttggttgctggccttgagttcaagggtgcgcgccgaaacgatattctcaagttgccccaggtactccgtaaggcggtcttcggcgtggcgccgctgctggatctcggtttccatgttttcgaattgctggttggcgacgctgaccagcacgccgatttcatcgtgttcatgccccggtgggcaatccaggcgcgcctgtttgcgtgtgctcagctcgcggataatgcgcaccagcggttgggtgagcattacgtagaacaggccgagcaaaatcccggtgagcagcaggctgcgggcgaagccgttgagcagggtgatctcggcgcgatgcaggaaacggctgccaaaggcataggtgtcgacgtccaggcgcagcacacccagcgagtcgttgggcatatggctgagaaacagccggtcttcgaactggcgattggcgccaaacagaaaatcgctgacgggccgatagttgctttctttgcgcgggcggttgacgtccgccagcaccaccccattgttgtcgatcaactgcgcgcggatgatggcaggggagtgcagcaggcccagggtcagttcctgggcgagttcggcatcgatgttgtaggcgatgcgtgacgccgggttgtggctgatttcaatcagtgagcgtatttcacggttgatggatgcgtcttcactggcataatcaatgccgatttggatcaggctgagcagggttcccaagacgaaaccgaccagcacagtcaatctggcttgtttataagacaagcggtgggcgaacttgatatccatcgagtgttgaaccacttagcgtttcccttcgcccggcaagcatagctgaacatccacacgctttggctcgcccggcatgaatcgtttttttgatgcagcccatgcagtgtgccgcagggttgccaatacgccatcttttgcaagaagttgccagaggaatagctgtggattctcgattgaatgcctttcttgagcgcgccgatgcggtgctggctcgcctggaaccgttgttacccgccccgcgccaagcgatcgactggagccaatgcctggccgcccgttggcagcgcgaaggccgcagtggcttcctgttgccgctggaagtcagcctggacatgcgcctgtcggacctgatcggtgtcgataaacaacgcgagcaactggcgcgcaacacccaacagttcctcgacggtttgcccgccaaccatgcgctgttatggggttcgcgtggcaccggcaagtcttccatggttcgtgccttgcttgcccagcacgccaaggcgggcttgcgtcttatcgagatcgagcgtgaccacctggcggatctgccgcgggtagtcgagcaactgctcaagctcccccaacgctttattctgttttgcgatgacctgtcgtttgaggccggcgaaggcgactatcgcgtgctcaagagcgtgctcgatggctccctggaacaggcgccggaaaacgtgctgctgtatgccacgtccaaccgtcgccacctggtgccggaaaaccagagcgacaatgacaactggaagcgcgtggatggcgaattgcacccgagcgaggcggttgaagacaagattgccttgtcggatcgttttggcctgtggctgtcgttctacccgtttagccaggagcatttcctgggtgtggtggagcactggatcggcgagttggccagcaaggccggcttgcagtggcagcgcgatgagcagcttgatgtcctcgcggtgcgttgggccactgggcggggcaaccgcaatggccggtgtgcctatcaattcgcccgttactgggtgggtcttaaattgttggaacgtcaaccatgatcgatttacaacaggccggcagcggccttgatggctatgccatgctgtgcgcgcaactggagtcgttgttggctgatgagcgcgattttattgccaacagtgcgcagttttccgcgttcctgttcaaccagttggatgacttgaactgggcgggcttttacctcaatcgcaatgaagagttggtactggggcccttccaggggcagatcgcctgtgtgcgcattccatttggtcgtggcgtgtgtggtgcggctgcggcaacgcggcaaacccagcgcgtggaggatgtgcacgcgttcccaggccatatcgcctgtgacagcgcttcgaacagtgaattggtagtgcccttggtcaaggacggtcgcctgattggcgttcttgacctcgacagcccattgctggcccggttcacccctcaggaccaggtgggcattgagcggctggcggagattttcctgcggttgaccgactgctgaagcggctggtgctaaggcaggttggggtaggggcgcgtttgctcactcctgcccctaccggccctggcgattattggctttgcagctcatccagttgaacctgcagcatcttttccagtgcctgcatgagttgttccagggccttgataccgctttcgatcacggcccactcctcattgcgagaacagctttgctccaaggcttcgcattgccccgccaatgaatgggcttgcacgatacgggctgcgcccttgatcttgtgggcttgctcaataatttccgagagtggcgcgtgtcgatccagcagttcgctaaggatctggcggtcttgatggctgctgctcagtagttcctccagcaggcgtctactcaaatgggggtcacctccggtcaacgcttccaggcattcgaggtccagtcgttggtgcacggctttagggacaatgtgtgccagttggcgctccaatacggtgaggctgatgggcttgaacagacagtcatccatgccggcctgcacgcaccgttgtctttcttctggctgggcattggcggtaaagcccagtaccacgcagggcaccaattgttcgcgctgctcatactcacggattgagcgactcagttcatagccattcatgatgggcatgttgcagtcggcaatcaccaggtcgaaatgctctttacgccaggcctggaaccccgccgcaccgtgctcggcagcggtgaatttatgccccaggtagcccagttgctggcacatcagcaggcggttcgccgggtggtcgtctaccaccagtacgttaagcaccagtgcggtggccggcgtttgcggcgtgtgttcaccctccgcctggatcgcttgcaggcgaggcatgctgaggttgacgtgcacctgggtgcctaccatgggcacgctgctcaggctcaattggccgcccatcatcgcgcacaggctgcggcagatcaccagccccaggcccgcgccactgcgggccagttgcccggagttgtccgcttgggcaaagggttcgaacaggcgcagttggtcttcccggctgatgccgatgccggtgtcttccaccaccagtctcagctcgatctgctccggggcctgggtaggctgcagctcaaccttgatcttgacctgcccctgttcggtgaacttgatcgcgttgctgacaaggttcgatagcacctgcttgaagcgcagtgggtctatcagcacctcgatatcgttcagatcgggtttgaactccagcagcaggctgagggttttctgccgtgccagcccgtcgaagacgcgcaccactgattcaatcacctcccgcaggttgacgcgctccggcgctaggctgaggcggccggactcgatacgcgcgatgtcgagaatgtcaccgatcagctccagcaggtctctggccgagttgtacgccacctcgatcgccggacggtcaaggtgcccttggtcggcgcgcttgagcgtcagttcgagcatgccgatcacggcgttcatcggggtgcgaatctcgtggctcatggtggccaggaacgtgctcttggcgcggttggcctcgtcggcacgctccttggctgcgcgtagttcatcgaatagctggcgtcggtcactgatatcgatccagccaccgatgatgccttggacttcacccgtggagtcgcggtagggcaggatccaatggtagatggtcagtttcctgtcgtggatatgcaggctgcgatcgaggatcagcgggttgccctcggcgactacgcgcaggtagtcagcatgatactgggctgcttccgacgccagggccatggtcatctgggtcacgcttttgccgatcacctcttcgcgcttgacatcgaacacctgcaggtagctgtcgttacaggtctgcaacagcccattgcggtcgcgcacgtagatcggatgcggcgtctcattgaccagtgcgcgcatgaactcgaactgatcgttgagggcgcgttcggccatttttcgatgcttgatctggcgacgcatgtaggcattccaggccagggaaatcaatagcaacagcccggtgccgatgatgatgcgcgcgatcaattgatggtagttacgccagtagctgtcggacgcggcggtatagccacgccagcggctgttgatcacacccatttcatccggggcaatgctgagcagggccttgtcgaggatagagctcaactccgtggcttgacgcgaggtggccagggtgaaggtcgcaggggtcgtgccgatgctggcactgatttgcaggcggtcctggaaaacctgggaagacaggaagtagttggcgatcaccagggtattcacggccccgtccacttgtccctgtgcgagcaactcagatgctctgaatgtatcactggtttccaccaggtgaatctcaggaaagtccttgcccaaagttgcggccaaggggttgccctgggttatagccagacgctttcctgccatttgctccatgttcgtgggcgcccctggctctttgcgcgtcagcagcacataggagttttccaggtaaggacggctgaaattaagctgtgagtctcgttcgttgcttggaacgatggccccgatcatatcgattttctgagccgcgacctgatcgatcatcgcgttgacgtcgcgcccgcgctgcaccgaaaaacgcaggccggtgcgcaggcgaatcaactccagcagatcggcggtgatcccgcgaaaattaccgtccgcatcgaagaacgtcaggggcgcgaaggtttcgttgacgatcaccgtgaccaccgggtgatctttgagccaacgctcttcgcgctgggtcagttgcagtttctggtcggtcagcaggatgtcgctgccggcgctccagcgcttggcaatgctgtccctttcgttgatgggcaccgaggccagggctgaatcgacaatgctgaggagcatccggttgtcctggcgtgtggcaaaactgaaaccataagcttcatgcttgccgaagttggccatgcgaatgtttttgagatagcccttgttgatcatgtaatgggtggaaatggtgtcaccgagaaacacatccgcctggtcgaaggccactgcattcaaggcattttgataagacgggtaggcgcggatgatcgccttggggtacagcttttccacctcattgagcggcaggtagtgatagacaaggctcaggcgcagcccgtcgaggccttcgctgaggctgcgggtttctccctcgcgcgtgaccagcaccggctggtccacggcatagggttcggagaggataaggttcggcgttgcagcttcaaacccgttggaggagcccagcaggtcaatttccccggcttccagggcacgaatggccgccgctcgggaggggtagcgcatcacagtgatgggcagggagagtgccttggccagcagtcctgcatagtcggcggtaaggccttcgtaatcatggccgctggaagtgaggtcgaagggcgggtagtcgggcgtggatgtccccagcgttagttcacgtttgttctgcagccactggcgctgggccttgtcaaaatgagtgtccagttgaacagctcccgcgcgactcaagagggtgaagcgttccgggctggtttggtgctcagcgagcacagtcgtgctgaagtacaaaccggcacttagtattattagatagtcctttatacgcctgggcatccgctttctcacactagcgcgtttcgttttgccatctcgatgaggtcaaccaaggatttggcttgaagtttttgcatgagtctctttttataagtgctgacggtcttgttacttaagaacatgcctttggcgatttccttgttagtgcggccctgtgcaaacagttgcaggaccatcagttcccggtcgttgacggtcttgaacagctccagctcttgagcatccatgccttcggttccggggccattcaaggcctggctggggaagtagttgtagccggacagcaccgcgcgaatggcactcagcaactcgctcaggtcaccctccttgcacacgtagccttccgcccccgagcgcatgcagcgcgtggcaaacagcgtggggcattgggccgtgagcaccagggttttcatggaggtgttcatggcgttgaaccggcagagcacctcaaggccatcaagtttcgggatgctgatgtcgagaatcaccaggtctggaaggcattcacggaccatctgtatggcatcgcacccgttatctgtttcgccgacgactttgtaaccttcgtgctccagcaacattcgaatggcaagccggataacggggtggtcatcgataataaaaactgtgttcatagtcactttccatgcaggtgcagataaagcgggcacattagctcagaaggtgagtgcgcagtatgaagctcgcacggagtagatgcagaacaggaaagttcctacatttaaaaaggtatcggcctacaagttgttaggtaatcgtgacagcgcatgtgagcgttttgaggatgagccagacaagaaaggaggcttggagatttacggcggaccccgaatcgtttttcgttgtaggggatgtttaaaatcctacaggagcgggttaaaagttgagcggactaatcgctcaagttcatctttgttcagaggttttgataagtagccaaggaggggcagacttcgttgtgcggcttgtatcgtcaggttaaccaattccgaggtgggtaaaccgcttaacaagatagcgctggtgatgaagcgccggcggctggcgatttccaccaattcaagcccgggcaggtcgggcaggcattggtcgcataacatcaggtcgaaagggtgttcggactgactcatcacgcgtatggcttgctcggcgttttccaccggggtcagttgatcgaagccgaagcttctgagcaggcactgggtggccatgagttgaaaggggtgatcctccaccaaaacaatacgaagagaatagctgggcataaagagcacacagtaaggcaagcgtcgatgggggcagtaggaattactcggcgggtccgttgggggcgcgcgtgattattcttcgtgcgcctgtacgaattcgatcaggccgctctgttcccatcgtagggcaattcgcttcagggaacaggcagctggatggagtcgttattgagggctggagcgcccagtcatttcccgtgccatttcggtggcgtagctgtcggtcataccggcgatgaagtcgatcatgcgcaggaaagaggcgtgcagcggccaggcggggtccggcgcgctattgcccagcaaatcgagaatgcgccggttcttgaacgacggcgtgcgcccgccatgttgctccagggccgcgccgcaaaaggcattcagcagaatttccagggtggtgtaggccccgatctcatgcaatgtcttgcgcttgtcctggaagatcttcttgcgcgccatgtccttggcatccagcacgcagcgctttgccgggccgtgcatgtgctccaccaagtcaccgggcagcgtgccggccaacagggcgtcctgctgttcgacaaacgcctgcgccgccgcattggtcaggtgctcgatggctttgccgcgcaggatcgccagcttgcggcgacgtgagtccattgggcccagttggcgataggtttgcggcaggtcatcgccgaccaggttcagcagcagcgactcgacttcggcgtactgcagaagctccatttccaggccgtcttccaagtcgatcagcgcatagcagatatcgtcggcggcctccatcaggtagacgagcgggtgacgtgcccagcgttgctcctccaactggggcaggccaagcttgtgggcgatctgctcaagaatcggcagctcgctctgataacagccgaacttgtgtttcttgtagcccagcgagtcggcgtggcgggcggtccaggggtatttgaggtaagtgcccaacgtggcgtaggtcagccgcgtgccgccgtcgaactgatggtattcaagttgggtgagtacccgaaagccctgggcattgccttcgaagttcaggaagtcattgcgttccgcgccgctcatgtcatccagccagccgcgcccggcggcctgttggaaccagtggcgaatggcgtcttcgccagaatgcccgaatggcgggttgccgatgtcatgggccaggcaggccgattgcaccaccatgcccaggtcgctcgggtcgcaccagtcgggcagggcgctgcgcagggtttcgcccacgcgcatgccgagtgaacgccccacgcagctgacttccagggagtgggtcaagcgtgtatggatatggtcgttactcgaaaccggatgcacttgggtcttgcggcccaggcgccggaacgcgccggagaaaataatgcggtcgtgatctttgtggaaggggctgcggcccagttcttcagggctgtgcaggggttttccaagacgttcgcgggtcagcagggtgggccaatccaaggcgcaggttctccgtaacgtgaatgacagttccagcttcccgcttcggcttttgtgatgcaagcgaatccagcggtaagccgagtcgatatcaattaacagccagcgcaaaaaaccgcaatgaccagcacgtgtctggtcattgcggtcatcggctcacgcgtatcagcttttgcgcgaagagctctgcatggccaacttgatcagcgggatcaacccggcacccagccgcaccaggcgcgtgacgctgctgatgctgccgcccttggcgcctttgccggtaaagaagcccatcagcgtgaccgccgccacgccccacaacggcgcgtgcttgatgcccaggctgtcctgccagttgtggcgcatgttgcgcattttgtgcaggggcgccatgagttgttgggactcatgccggatttcctggcggtgcatttccatgcgcaggcggatcaaggctttgcgcatttcccggcgtgacgtgttttgcgggatctcagtcatgctcatggcagcaggcgctcccggtcattggccagttcttcgagcgtggcgtggaagggcgtggactcatcgaacaccgccgccttcaagcgcacaccgcagaacgcagcggccaggctatagaacacgcacaggcagatgataccggtgaggcgatagcccgtatcccacaccaggatcatcaccagtgtcgacaaccccaccagcaacagcagggcaaacaccaacgccaggccggcaaacagcaacaggctgacggtgcgggccttttgctcttgtaattcaatgccgaacaactcgacgtgactgtgcagcaagcccagcacagctgcgcccaggcgtcgggaggtcgaaccgcttgctgaggaatgtgcgctcgaagatgagctggattcgccgatagacatggttagcgccttgtagccagcagaccgatcaaaaagcctacgccggcagcaatgccgaccgactgccatgggttggcttgcacgtagtcttcggtggcagtgatcgccgcctggccgcgctcgcgcagtgagtcctcagtcagttgcaaggtctcgcgggccttgagcaggctctcgtggatcttggtgcgcagctcgtcagcctggtcaccggccagcacggcggtgtcgtccagcaacttttcggtatcgctgaccagggtttgaaaatcctccatcagtatctcttgagcagtctttgctgttttaccggccatggttgtctccgtgggtagctgatttgtacgtgtggtttcgagtcgcggcgttggctgaaggttcagtgcaattgtgtggtacagcttttgctttgccttggtgcgcaggctttagggcctgcgctgaatccgggcggtcgaggtaaacaccttgaaaaaccttaccctaaatcactcaacttcgcggaaaaaccctatcggcaacggcctgttgtgttgaacgctgcgctaaagcggttcacgcctctgaagaggggcgaagccggcggtgccaatttagtgcgcgaaactctggcttgaaccgctttggtgctttttgccttgatgcaggcctgccaacctccatggaaaacttgcaaagcgcagtggacacccttgtccacagttccaacaccctgttcatcctgattggcgcggtcatggtactggccatgcacgccggctttgccttccttgaagtcggcacggtacgccagaagaaccaggtcaacgccttgtcgaaaatcctcagtgattttgcgatttcaacgctggcctatttctttataggctattggatctcctacggtgtgagcttcctgcaaccggccgccgtcatcagcgccgatcatggttacggcctggtaaagtttttcttcctgctgacgtttgccgcggcgattccggcgatcatttccggcgggattgccgagcgtgcgaagtttacgccgcagttgtgtgccaccgcgctgatcgtggcgtttatttacccgttcttcgaaggcctggtgtggaacggcaactttggcttgcaagcctggctgctagtaacctttggcgccagcttccacgactttgccggctccgtggtggtgcacgccatgggcggctggctggcgctggcggcggtgttgctgctgggcccgcgcaatgggcgctatcgcgaagggcgcctggtggcgtttgcgccgtcgagcattcctttcctggcgctgggctcgtggattctgatcgtgggctggttcggctttaacgtgatgagcgcgcaaaccctcaatggcgtcagtggcctggtggccgtcaattcgctgatggccatggtcggtggcaccgtggctgccctggtgattggccgtaacgatcccggttttctgcacaatggtcccctggccgggttggtggcgatctgcgccggctccgacctgatgcacccggtgggcgcgttggtcacgggcgtggtggctggcggcttgttcgtgtggtgttttatcgctgcccaatcgcgctggaagatcgatgacgtgctgggcgtgtggccgttgcatggtttgtgtggtgtgtggggcggcattgcctgcggcatcttcgggcagaccgccctgggtgggctgggcggtgtgagcctgatcagccagttgatcggcaccgggctgggcgtggtcgtggcgtttggcggcggcttgctggtgtacggcgtgatcaaacgcgtgcaagggctgcgcttgacacaggagcaggagtattacggcgcggacctgtcgatccacaagatcggcgcggtcagtcaggattgatcggcgcttcttcatctgtatgtggcggcgggtaaaaaccgtgtagcaggcggtagcggttgtgccgtacctcatccacccgtgcctgcacctgttggtccggcaggcccagcaggatcagggcatgggcggcgagcatcaggctcgactccagcaactcgggcaccacttcgctggcgcccgcggccttgagctcagccaactggctgtcatcgcgggtgcgcaccaggatcggcacgttggggttgatctgccgcgcctccttgagcaccaccagggcgacatcgctgttgtccaccgcgatcaccaccaaccgcgcccgctccaggccgacggcgctgagcaaggcgccacggcggcagtcgccgtaatgcacactgctgtcctcggtggcggcttcctgcacccgttcggggtcatcatccagggcgataaacgcctgttgttcgcggcgcataaagcgcccaatggactggcctacgcggccatagccgcaaatcactacgtgcccgtgcagttgggcattgagcgcggtgatctgctccagttgcacttgctggttgggcttgcggtgcaggcgcagggcaacggccggtgccgcacgcaacagcagcggtgtcagcagcatcgagcagaaggtggcggccaatagcaagccgttgaactcatcgggaatcaaccggctctgctgcatctgcgccatcagcgcaaaacagaactcgccgccctgggccagcgccaggccgctgcgccaggccgtttcggcgtcgctgttacgccatttgaccagcgccgcgaccaccatgcctttgaccagcatcaacgtgagcgtcaggccgaagatcaacaggctgtggctgacgaacaactgcaggtcgataagcatgccgatgctgacaaaaaacagccccagcagaatgtcgcgaaacgggcggatatccgcttcgatctggtgccggtaatgactctcgcccagcaacatgccggccaggaacgcgccgagggcaggggacagccccagcaggtgggtgagccaggcggtgagcaagacaatcaccagcgccagcagcacaaacagctccgccgaatgcgacgcggcgacttcacggaacaggcgcggcagcaaccagcggctggcgaacaacaggcccacgaacagcaccacggtcttgcccagggtcagcggcagcgcccagtaccaggcttggtcactgctgccggcaaacaccggcaccaaggtcagcagcaacaccgccacgacgtcctgaaacagcaacacgcctatcgcgttctggccatgactgctgaagatctcaccgaggctggtcaactctttgctgacaatggccgtggacgataacgccagccctgcgcccagcagcagcgcgatgccgggtgcgaggccaaagcccatcagtaatgcgcccagcaatgccccacaccccagcacttgcaggctgcccaggccaaataccacgctgcgcagcgccaacattttcgacagggaaaactccagccccagggaaaacagcaggaacaccacgcccatctcggcgaggtccggcaggtcttcgttgtcattgacccaatccaacgcggtgggccccactgccaggccaacgcacaggtagcccagcacagggggcagttgcagccggcgaaacagcgcaatcaccaccagggatgaggccaggataatcagcaggttggcgaacacaggcatctccgttgcagggtgagcggcaaaaaagccgcgagaatcgctgaatcagttataggccatggtgatctgggtcaggctttttgcaccgtaggagcgagcttgctcgcgaaaaacgtcaacgctagcgcgcagggtcctgaatgagcgcggcgcacgggagcttttcgcgagcaagctcgctcctacaaggggcttgttgggcttagaatggaggttcgttttgtgacctgagtcctttgatcatgcttcctgaatgccagctgttcggcaccctgggttgccatctgtgtgagatcgccgaagccgaaatcatgccgctcgtcgaacacgggctgttggtggagttggtggatatcaccgatccccaggacctgacagatgtctacggcctgcgtattccggtgcttcgccgcatggacaccggggcggaactggactggccgttcgacaccgatcaggtggttgccttcctgcgctgagatttatgcgatggcggctttccaaatattaagttactgtatattcgtacagcgattgaatagagggaacgcccgtggtgaatgttgaacaacttaaaagcagcgtcaatcgcatgtccgccgatgtggtacgcgacgcggtgaacgagctgcgcctcgatggcctggtcacggaaggcaagacgccgtttaacaaagtgcatttcaacacctgctttgcggaaatcgaggcgctgttccagcgcgccggttatcacaagcagctggatgtggtgggttatcagggcttgctctacgcgctgtatgacccgggccgttgggaagcagtggacgtgctgcgctggctcaaggaattcaccgaggcagcaagcgcctcgccggtgctgcgggctcaactggccaaggcctgagataggccctaggcaatcgcgcgccatgggcgataatgctcgcctgtttccaggctttgagcgtcggcatgtctacttgcgttttttctccctcccagcaccaagccagcaccctgtacttgccgccgggctcctgggggacggtgcttgactgcctgtgcgcacacttcccggccattggccgtgaacagtggctggaccgcattgcccgaggccgggtgctggatgtcaacggtagcccgatcagcctgggcctgggctacaaggaaggcctgtgcatctattactttcgcgaagtgctcaacgagaaagtgattccggtgcaggaaagcatcctgtacgccgatgagcatctggtggtggcggacaaaccgcatttcctgccagtgacacccgctggcgagtacgtcgagcacactttgttgcgccgcttgatccggcgcctggacaaccccgctctggtgcctctgcaccgtatcgaccggcatacggcggggttggtgctgttctccgccaacccgcatagccgttcggcctatcagcaattgtttcccacgcgacgtatcgacaaattctacgaagccatcgccccggccttgccgcatctcagcttcccgttggtgcacaaaagccgcttggtggatggcgaacctttctttcgcatgcaggaagggccgggcgctagcaacactgagacggcggtagaggtgcgcgagaaaaatggcgatctatggcgctacggcctgttcccggtgaccggcaagaagcaccagctgcgcgtgcacatgacggcgctgggagcgagcatctgcaatgacccgttctaccccgaagtgatcaaggacgccgaggatgattacgcaaggccactcaagctgttggcccagggcgtgcgttttatcgacccggtgagcggccaggagcgcagcttccgcagccagatcaccttggactggtaaaccccaggaacaacaaggcccgcgctaggcgggccttgtgtgcgagcgttaagacttacaggtctttaacagtgcgaacctgatctttgttgattcgggtgtgcttgccgtccagctgttcgaattcgtagaagcccgaatcttcatcgtatttcggggtgtcgacggcctggatttcgcgaccgtcattcagggtgatcactgttggcgaagcgcaaccggcgagggtggcgaggcccagtgcaagcatgagagcggcgatggtccgttgagtcatgagtttgtctccgagagaatacttttaaattgctgaccttgtgacgtacgagacgccggcaaagttccttgtgcagggttcattctgacatgccagccccggggtgcaacagctcgggcgtattaagattggccaggcgcgggtcattggccgggcattgcagggccaccgcgcccagttgcagccagagcttgcgagggctgcgttcacccgcttgccacgcctgttccacctggtttttcaggcttgtggggatgatgcacagcaagggttcccagtcttcaccctggcgcaccatcaccggtagctgcgggttgcgtcgtgaggtcgcacgcaggtcggccagcaaccgcgcatcgatctgcggcacatcgcaaggcaagatcagcagatgcgcatggcgtgcggcgaagagtcctgcgcggataccggccagcgggccggggaagtccgggctgtcatcgctcacttgttggtcggcatagagcgcgtagcgttcatggttgcggttgcacgagatgatcaggtcattggtgagtggccgggccaactggtgcaggtgggcgatcaagggctggccttgccattccagcagccctttgtcctggccgcccatgcgttggccgcgacctccggccaacaacaggattgaacacggcagggaggaaaattcaaagctcatggtagttgcgctgcggcaggtaaacaggggcctgtgatataacatcgggctgttccttcgacaaccggaccgtgccatgaaagccaaggccgatgcgccctttgtacccctcaatattgctgtattgaccgtcagcgacacccgcaccctggagactgacacctccggccaggtcttcgtcgaccgcctcaccgccgccggccaccacctggccgagcgcgtgctgctcaaggacgacctctacaagatccgcgcccaggtggcccactggatcgccgaagacgtggtgcaagtggtgctgattaccggcggcaccggcttcaccggccgcgacagcacgcctgaagcagtgagctgcctgctcgacaagcaggtcgatggtttcggcgagctgttccgccagatctccgtggccgatatcggcacctccaccgtgcaatcgcgcgccttggcggggttggccaatggcactctggtgtgctgcctgccgggctccaccaatgccgtgcgcactggttgggacggcatccttgccgagcaactcgataaccgtcatcgcccgtgcaacttcgtcccgcacctcaagcaggccgagccttgtgaatcccgtgggtaagcccggcaagaccggcgccctgatgccggtggaagcggccttgcagcgtttgctcgacatggctggcgctgcaccgatccgcgagcagcaagtgctgcccctggctgagtgtgatggccgggtattggcccaggacttgatctccacactcgacctgccgccgtggcccaacagtgccatggacggctacgccgtgcgcctggcggactggaccggcgaacccttggtggtgagccagcgtattttcgccggcactgctcctgaacccttggcggccggtacctgtgcgcgcatttttaccggcgcgccggtgccccagggggcggactgcgtgcagatgcaggaaaacgccgtggtgcatgccgaccagcgcgtcagttttaccgagccgttgcacaagggcgacaacatccgtccccagggccaggagaccaccgtcggcgagaccgtactcaatgccggcacccgcctgggccccatcgagctggggttggccgcgtcccttgggcgtgatcgactcgaggtggtgcggcgcgtgcgcgtggccgtgttgtcgaccggcgatgagctgatcgagccaggactgccgctcggccctgggcagatctacaacagcaaccgccgcgtgctgtgcagttggctggtgcgcatgggctgtgaagtgattgatgccgggattttgccggatgatctggaacagacgcgcacgcgcctggcggggctgggcagcgttgacctgatcctctcgaccggcggtgtgtcggtgggcgaagcggacttcctcggcattgccttgcgcgaagagggtgagctggcgctgtggaagttggcgatcaagccgggcaagccgctgaccttcgggcattttcgtggcgtgccggtgatcggcctgccgggcaacccggcctcgaccctggtgacctttgcgctgttggcgcgcccgtatctgctgcgtcgccaaggtgtgatggaggtgcagccgttgcgcttcgaagtgccggcagggtttgtctggcccaagcctggcaaccgtcgcgagtacctgcgcgggcggatcgaacagggcaaggcgatcatctaccgcaaccaaagctccggggtgctgcgcagtgcggcatgggctgagggttttgtggaggtgatggaagggaccacgttggccattggcgaccgggtcaatttcattcccttgagcgaagtcctgagctgaccgcgcgctaaaaaatgtgggagctggcttgcctgcgatggcggcctgccagccgccccctatctacctgacaccccacgatccaactgtgggagctggcttgcctgcgatgacgccctcacagccgaccaatatctacctgacaccccaacgatccaactgtgttgactgccaagccgccttcgcgagcaagcccgctcccacagttggttggtgtatgggcctcatgagcaatcagtaatcgtcaccctgctcagtgacgtcccgctccactggccctgcatccgggtcgtagcccactgggaacttgcccttcaacgtccaggcaaacgcaatgatttcggcaatggtgcggtacagctcctctggaatgctgtcgcccagttccatgcgcgccagcagtttcaccagctcggggttttcatagatggggacttcgttctcccgtgccaatttgaggatggcttcggccagggcatcatcgcctttggccgtcagggtgggggcctgttggccgtcatacttgagggcgatggcctggcggggtggggcggcgtttttcatgcggtttcatccacccagcgttgttccaatccggtttttggtccgcgtggcggggtgcccagatggcaatccaggtcgccgacgttgagcccggatgacaccagacgctcgcgcaggctgcccaagtggctttcgatcaggctggcggtgaacgggcggctggcccacagctggctggacagtttgccttgggacagctgcgcctgaacttgcaacggccccagtggctccatgtcgaaggccagttcgacgcgccagagcatttgtttcgggtcttttttatccttgcgctcgggctggtccttgtctggcgcgggctcctcgcgctggaacttgacctgcaacggcacgatgtcttgcagagtgcgcagggggatttccagctgccaggtcgtttgcaggcggccgtcggcggtggtgccggtctgttccaggctcgacagttgatggctctgcaagcgcgagatcgccccggcggccaggcgcagcaggttttccaggtcgccttcaccttccagttttgccatcagtctttcgggcagcgggaagccggcgggtatctgccgggcgccgacctggccgagggtgttcagcgggctgcgcacaaagtgcggcaacacctgggccagggtattggcggcgagaatcgcattcaggttggtgctggcgggcagggcaggcagcaggtctgcgaccaggcgtaacagcgcgcctttcatgtccaacggtgggatttgcgggttctgcccggcaagcaatttggcttccagaaaggcgccgctgttctgcaccacctgggccagtaccttgggattgctgacctgcgccagatcgggcaaggccgccaataatcgctcggcggcggcccgcagctcagccgatgtgctgtcaccacggggcaggttttgcaaggcgctaaacaccgcgtccagcgagccttggcgactttgctgagtggcgagttgttgcgccacggccagttggtctttcaagccgctcagcggtacgaagttcagggtttgcgcgttctgcaccacggcactgagcaagctgcccaccctcaacggctgggggctttccaacgtcagggtggtaccggccagggcgttattgagcacactcaccagcgagcgatagatcgccggttgcgccgtgccctgaggcagcatctgcgtggtcagcactttggcttgcaacaacgtacccaccggcatttgcgtggtgtcgaggcgggtgagggcggccacattggcgctcatggcttgctgcaaggtgatggccaggttgcccgcaggtgtctggcttaccgccacattgctgcccaggggcaggggctgggcactgctggcctgcaccagggtttgtcggccgcctgcgagggtcaacttgagcagcaactgaaaggcctcgccgccttgtttaagcgcgatgacctcagcgttcacggttttccccggctcgatcaacccggcctgtggctccagcagtttgagcaacgcgccggccccaggcagtggagcaggcccgggcgtggaggctggcggcagtggaggaagattgatctcaccggtcatcgtacgcatcgtctctggggaaattgccctctttagagtagggcatcgcatgtataatgccgcccgtctgcaaagagagcggtaaaaactcacaactatttgatccagctctctaaaatcggtcgccaaagccgttattgtgcatctctctataacggccgctgcaccgccgacttgaaccgtaaaggcccgcgatcttttgaccagccctcttcttgaagccgtagcgcttgcctgtgaacgcgacctgcgcctgctgttcgagcaactcgacctgcggctttcgggtggcgacatggtgcaggtcagtggccccaatggcagcggcaagaccagcctgctgcgcctgctggccgggctgatgcagcccacggccggcgtggtgcgtctcaacggcaagccgttgaacgaacaacgtagcgaggtggcgcgcaacctggtctggatcggccacgccgccggcatcaaggacgtactcaccgctgaagaaaacctcagttggctcagcgccctgcatcatcctgcttcccgtgacgccatctggcaggccctggccgcggtgggcctcaagggctttgaagatgttccctgccacaccctgtctgccggccagcagcgccgcgtggccctcgcccgcttgtacttgcccggcccgccgctgtggattctcgacgaacccttcacggccctcgacaaacaaggcgtggctcaactcgaagcgcacctggcccagcactgcgaacaaggcggcctggtggtgctcaccacccaccacaccttggcgcgcatgccggctggctaccgtgagctggacctggggcggtggtcgctatgagtgtgttcgccctgttggtggcccgtgaagcccgactgctgtgccgtcgccccgccgaactggccaacccgctggtgttctttgccatcgtgattgcgcttttcccgctggcggtcggcccggagactaaactgttgcaaaccttgtccccgggactggtgtgggtcgccgcgcttttatcggttctgctctcgctggacgggctgtttcgcagtgatttcgaagacggttccctggaacagtgggtcctttcgtcgcaccctttgccacttctggtactggccaaggtgctggcacactgggctttttccggcttggcgctagtcttgctctcgccactgcttgccatgatgctcgggttgcccgttgaatgcctgccggtgctactcctgtccttgttactcggcacgccggtgctcagcctgttgggggcggtgggcgcagcgttgacggtcggcttgaagcgtggcgggctgttgctggctctgttgattctgcctttgtatatcccggtgttgatcctgggcagtggcgcgttacaagccgcgcttatgggcatgccggcgaccggttacctcttgtggcttggcagcctgaccgccctggcggtaaccctgacaccttttgctatagccgccggcctgaaaatcagcgtcggcgaataatgaggtctgaccctgcgttaacgacgcggagtcagtaaagaccctgagcttttcgccacgacgaaaagcaccgtgatggaaacagcaatgaactggacctggtttcacaagctcggctcgcccaaatggttttatggcatcagtggcaagctgctgccgtggttgagtatcgccgccatcctgctgatcggcatcggcctggtctggggcctggccttcgcgccgccggactatcagcaaggtaacagctttcgcatcatctatatccacgtgcctgccgcgatgctggcccagtcctgctatgtgatgctggcggtgtgcggcatcgtcggcctggtctggaagatgaagctggccgatgtggccctgcaatgcgccgcgcccatcggtgcgtggatgaccgccgtggcgctggtgaccggtgcaatctggggcaagccgacctggggttcgtggtgggtgtgggatgcgcgactgacctcgatgctgatcctgctgttcctgtatttcggcctgatcgccttgggcaacgccatcagcaaccgcgacagcgccgccaaggcctgcgcggtgctggcgattgtcggcgtgatcaacatcccgatcatcaagtactcggtggagtggtggaacaccctgcaccagggcgccaccttcaccctcaccgaaaaaccggcgatgcccgtggaaatgtgggcgccgttgctgctgatggtgctgggcttttactgtttcttcggtgccgtattgctgctgcgcatgcgccttgaagtgctcaagcgtgaagcccgtaccagttgggtcaaagccgaagtgcaaaactgcctgggagcacgcggatgagttttgcttctttcagtgattttctcgccatgggccaccacggcctgtatgtctggacggcctatggcatctgcctggcggtgctggccctcaacgtcgccgcgccgatcctggcccgcaaacgttacctgcaacaagaggcgcgacgtctgcgccgggagactgaaaagtgaatccgctgcgtagaaagcgtctgttgatcatccttgccatcctggtcggcgtcggcattgccgtgaccctggccctgagcgccttgcagcagaacatcaacctgttctacacgcccacccagatcgccaatggcgaagcgccggtcgatacgcgcatccgcgccggcggcatggtggagcagggctcgttgaagcgttccggcgattcgttggacgtgaccttcgtggtcaccgacttcaacaaggccgtgaccatcacctatcgcggcattctcccggacctgttccgcgaaggccagggcattgtcgccctgggcaagctcaacgccgacggcgtggtagtggctgacgaagtgctggccaagcacgatgaaaaatacatgccgcccgaggtcaccaaagccttgaaagacagcggccaaaccgcgcccgccgccccagccaaggagggctaagccatgacgtccgcactgtttattcctgagttgggccagttggcgatgatcctcgcgctgtgctttgcggtggtccaggccgtggtgcccttgctgggtgcctggcgcggcgatcgcctgtggatgagcctggcgcagccggccgcctggggccagttcgctttcttgctgttcgcctttggttgcctgacctatgccttcatgaccgacgatttttccgtcgcctacgttgccaacaactccaacagcgccttgccctggtactacaagttcagcgccgtgtggggcgcccacgaaggttcattgctgctgtgggccttgatcctcggcggctggaccttcgctgtctcggtgttctcgcgccaattgccgcaagtgatgctggcgcgggtgctggcggtgatgggcatgatcagcatcggtttcctgctgttcctgatcatgacctccaacccgttcacccgcatcctgccgcagatcccggtggacggtcacgacctcaacccgttgctgcaggatatcggcctgatcgtgcacccgccgatgctctacatgggctatgtgggcttttccgtggccttcgcgttcgccatcgccgccttgctcggcgggcgtctcgacgccgcctgggcgcgctggtcacggccatggaccatcgtcgcctgggccttcctcggtatcggtatcaccttgggctcatggtgggcctactacgaactcggctggggcggctggtggttctgggacccggtggaaaacgcctccttcatgccgtggctggtgggcaccgcgctgattcactccctggccgttaccgaaaaacgtggtgtgttcaagagctggacggtactgctcgccatcgcggcgttttccctcagcctgctcggcactttcctggtgcgctcgggcgtgctgacctcggtgcatgcgtttgcctcagaccctgagcgcggcgtgtttatcctgatcttcctgctgtttgtcgtcggcggttcgctcaccctgtttgccctgcgcgcgccggtggtcaagagccaggtcggtttcaacctgtggtcgcgggaaaccctgttgctgggcaataacctggtgctggtggtggccgcgtcgatgatcctgctcggcacgctctacccgctggtgttggacgccttgagcggcgccaagctgtccgtggggccgccgtacttcaatgcgttgttcatcccgctgatgggcctgttgatggtggtgatggcggtcggtgtgctggtgcgctggaaagacaccccggtgaaatggctggcgggcatgctgatgccggtgctgctcggcagcgtggccctggcggtgatcgccgggtttgcctacggcgacttcaattgggcggtactcgcgacgttcctgctggcggcctgggtgttactggctggcgtgcgtgacatcgtcgacaagacgcgtcacaagggtttgctcaagggcctgcccaccctgacccgcagctactggggcatgcagatcgcccatattggtatcgcggtgtgcgcccttggggtggtgctgtccagccagaacagcgccgagcgcgacctgcgcctggcgccgggcgagtccatggacctggccggttaccacttcatcttcgaaggtgccaagcacttcgaagggccgaacttcacctccgacaaaggtactgtgcgcgtggtgcgcaatggtaaggaaatcgccgtgctgcacccggaaaaacgtctgtataccgtgcagagttcgatgatgaccgaggctggcatcgacgccggtttcacccgtgacctgtatgtggccctcggtgaacccctgggcgacggcgcctgggccgtgcgcgtgcatgtcaaacccttcgtgcgctggatctggttcggcgggttgctcaccgggttcggcgggttgctcgcggcgttggaccggcgctatcgggtcaaggtcaagagccgggtgcgtgaagcgctgggcctttcgggagctgcggtatgaagcgttggttgatggttgtgccgctggcgttgtttttgctgatggcggtgtttttgtatcgcgggttgtacctggacccggccgagctgccctcggcgatgatcggcaagccgttccccgccttcaacctgccaacggtgcagggtgacaagaccctcacccaggccgacttgcagggcaagccggcgctggtcaacgtgtgggccacctggtgcatctcttgccgcgtcgaacatccggtgttgaacaagctggccgagaagggcgtggtgatctacggcatcaactacaaggacgacaatgcggcggccttgaagtggctggcggaatttcataacccgtaccagctggatatccgcgacgaagacggcaacctggggttgaacctcggcgtgtacggcgcgccggaaaccttcttcatcgatgccaaaggtgtgatccgcgacaagttcgtcggcgtgatcgacgaaacggtgtggcgcgaacagctggccgccaagtaccaggcgctagtcgatgaggccaagccatgaagcgttggttgaccgcagctgttttagccctgggcctggctggtgtggcccatgccgccatcgacacttatgaatttgccaacgacgccgagcgtgagcgttttcgcgatttgaccaaggaactgcgctgccccaagtgccagaaccaggacatcgccgactctaacgccccgatcgccactgacctgcgccgagagatcttccgcatgctgggggagggcaaggacgaccagcagatcatcgacttcatggtcgaccgctacggcgatttcgtgcgctacaaaccggcgctcaccggcaagaccgcgctgctgtggtttggcccggccgggctgttgctggccggcgtggtggtgatggccgtgatcgtgcgccgtcgccgcgttgcaccgattgatggcgctgatgcgctgtcccctgaagagcgcaaacgcctcgaccaattgctggacaccaagactgatgattgatttctggctcgcagccggtttgctgctactgattgccctgagtttcctgttgatccctgtgttgcgtggccgtcgtgcccagcgcgaagaggatcgcaccgcgttgaacgtggcgttgtaccaggaacgcgtcgctgagctgcaagcgcagcaggacgaaggtgtgttgaataccgcgcaactcgacacgggccgcgccgaagcggcccgcgagttgctggccgacaccgaaggcgtggaaaagccccgtgaatcgcggttaggcaaaccgttaccgtttttggcggcgtttctggtgcctgtgctgggcgttgcgctgtacctgcattatggggcgagcgacaaggttgaactgacccgtgagttttcccaaccgccggtgtccatggccgatatgactcgccgcctggaacgcgccgccgccgcgcaaccggattcggcagaaggtttgtacttccttgggcgcgcctatatggcccaggaccgtgccgccgatgccgccaaagtctttgaacgtacggttgcattggccgggcgccaaccggaattgctcggccaatgggcccaggcgcagtactttgccgacaacaaacagtggtcgccgaaggttcaggcgctgaccgacgaagccttgaagctcgaccccaaggaagtcaccagtctcggcctgctgggtatcgccgcctttgagggccagcgttatcaggaagccatcgactactggaaccgcctgctcgcgcaattgccgccagaggacaactcccgcgtcgccttgcaaggcggaattgaccgcgcggcagagaagctcaaggagatcggtggcagcgtcgctcaggtgccaaaagcgcttttgaaagtgcgtgtggatctatccgccgaggtgaaagccaaggccctgccaggcgacagcgtgttcatcttcgcccgcgccgttaacggcccgccggcgcccttggcggccaagcgtgtgaccgtcgacgcattgcccgttaccgtcgaactgggcgatgccgacgcgatgatgccgcagttgaaactgtccaacttccccgaagtccaactggttgcgcgcatatcccgggccggccaaccgaccactggcgaatggatcggccgcagccaaccgttggccagcagcaccactgcgctgcagcaattgaccatcgacactccggaccagtaattctgaggacacgcccatgaccgcatatgcacgcatcaccctgctcagcctggtactcggcctgagcgcctgtgcggtccaccgcccacctgcggcgccgaccggcccgactattccacctgttggcccatctacgcagccgagcaccaagcccagcaccaaaccttccggccccgtgacaccggcgcccaaacctctgccaagcaaatcgccgaccttcgccccaccgccgggcgccgccagccattgggacggcaagatgcaggtgtatgtgctggacgaccagcctgacaccttctaccgccagcgcacctactaccgctggagtaacggttggagccgctccatcagccccaatgggccatgggaagaaaccaatgtgcaaggcgtgccgccggggttgagcaagcagtacgcgcaatgacaaaaggcgaccgtgttcaggtcgccttttttattttcgatttggaatgctattaactgacggagctggcttgcctgcgaagacggcctaacagtcaacacagttggaccgggtacatatccgttatttaggtaacggccacctagggttccgctctgacagcgggtcacttttggaaaagagcccggaatgccggcccagccaaaagtaaccaaaagggctcttgccccaccactcggcacctcgcttaggctcggtgtgcccgnnnnnnnnnnnnnnnnnnnnnnnnnnnnnnnnnnnnnnnngcagccagtggtagatcagcccaagccagaaggcaccaagcagccagtggtagatcagcccaagccagaaggcaccaagcagccagtcgttgaccggcccaggccaggcggcgacccccggaccgatgacaccacctacggattcaattcaaatactggcaagcgggaaaccaccctgacgtccgcgtccgataagccagagttcaacatctgggatgagcgtgggaacgatacgtttgatttctctggcttcaagcaggatcaaatcatcaacttgcgtggcggtgcgttttccagtgtaggcgggatgagggaaaacgttcgcatcggtgagaagacggtgatcgaaaatgccgtgggtggccacggtaacgaccgcatcataggtaacagtgccgataacgtgcttaccggtggcgcgggagccgatacgttggtgggcggcggcggctggaataccttcaagttcaatgcctttagtgattcaacccgcgccaatgccgacttgctgttggacttcaacacagggcaagacaagatcgacctctcgcagatggcgctcgacggcaaggtatcgttgaacttcgtcgataactacacggggaaggcgggcgacaccatcatcaagtttaacccgctgtctggccgttatttgctggcgatagacttggacggagatggcaagaccgacttcctgatcaagagtacccgaatgatcagtccggaagatgtcatagggctcaacattaaagatggcggttatctttgagggtttgatccactgtactaagtaaggctgggcgggacttattcaacggttgattaagtcccgcccctttttgcgttgtgaaaccccgtgatgtgcggctcaagggcctgtcagggcgcgtggagggcggccgacgaggctttacgtgacacagtccaaaagcgcaacagagcgaccagtgcaaacgcactgcccaccagcattacacccaaccagccgccgtgttcatacacgctgctggcaatcgccgaaccgaatgctccgccaatgaagatgctggtcatgtacagcgcgttcagacggctgcggctgtgggcgtcgagggcgtagatggcgcgttggccgaggaccatgttcatctgcacgcagaaatccaggaccaccccggtgattgccaggccgatcacgctgtagagcgggtgcaccaacgccggcaggaagctcagcgcaccaaacagcatcgccagcagcgaggcgcggtgggtatggccggcatcggccaggcgaccggccatgggtgcagcgatggcaccgagggcaccgaccagggcaaacagtgcgatttcgctttggctcaggccgtggttacgtgccagttccaatggcacggcggtccagaacaggctgaaggcggcgaacatgcaaccctggtagaacgcccgctggcgcaacagtggttgctcacgcagcagagtgcccagggagcgcagcaactggccgtagctggcactgtgatcgggttggcgcttggggatggtcagcatcagcaccacgctgataaacgccatcagcgccgcggccgccatgaacatcgcccgccagccgaagtggtcggccaccacgctcgacaccggccgtgccagcaggatgcccagcagcaggccgcccatgatactgccgaccacccggccacgagactcggccggcgccaggtgtgcggccagcggaatcaggatctgcaccgagacggaactgaaaccgatcagtaacgacaccagcaggaaaaggttcggctgttcgataaacgccgcacccaacaggctggcgatcgccacgacggtggtggcaatcatcagcttacggttttccagcaggtcgcccaggggcaccagaaagaacaggcccagggcatagccgatttgcgtgagggacacgatcaggctggccattgccggcgtcaggccaatgtctggggcaatcaactcgatgatcggttgcgcgtagtagatgttggcgacgatggcgccgcagcaaaacgcgaacagcatgaccatgccccgggtcatggtgccagcagcgggagaggttgcgttcatggtgtactcataaaggcgaaggacgatgaggtggggagagtaaagacaaggcctgcaagtgagtaggttgcttgtggtgatatcacttatgtcggctgatgatacattcagacacatctgcttcgcgcaaaaaaagtgggagctggcttgcctgcgatgacagcctggcagccgccccctatctacctgacaccccacgatccaactgtgggagcgggcttgctcgcgaaggtggtctggcaggcgacacagttggaccgggtacatatccgttatttaggtaacggccacttagggttccgccctgacggcggctcacccggcgtcctgccgggttacccacgaattcaagcctgcgttcggccagtgtggtttaacggggcgcctaagatcaaaagccagatcaggatcaagagcggctcgcttcgcatcgtggttagcgttggctgctgcaacctacaaagttgtgtagatacctatgctgcgatggcgggggatcagccgctcatgtgcaagctgactcgccgtcatcgcaggcaagccagctcccacaggtttgaccgagttgattcagtcagatgggttattggccagagtagatctggtcgaacacgccgccatcattgaagtgggtcttttgcaccgtgcgccagtcgccgaaggtcttctccaccgacaggaagtccaccttcgggaaccggtcggtgtacttggccagtaccttcgggtcccgtgggcgcaggtaattgttggccgcaatttcctggccttcgggcgaccacagatacttgaggtagtcctcggccgcagcacgggtgccttttttctcgaccactttatccaccactgacaccggcggttcggcttcggcggagacgcttgggtagaccacttcgaactgatcacggccaaattcacgggcgatcatttcggcttcgttttcaaaggtcaccagcacgtcgccaatctggttggtcatgaaggtggtggtggcggcgcggccaccggtgtccagtactggcgcttgcttgaacaacttgccaacgaaggtcttggccttttcttcatcgccaccgttcttcaacacgtagccccaggccgagaggtatgtgtagcggccgttacccgaggttttcgggttggggacgattacctgcacgccgtccttgagcaggtcgggccagtctttcaacgccttggggttgcctttgcgcacgataaacaccgtggcggaggtgaacggcgcactgttgttcggcaagcgcgttacccagttgtccggcaccagtttgccgttgtcgaccaaggcattgatgtcggtggccatgttcatggtgatcacgtcggcgggcaggccgtcgatcaccgagcgcgcttgtttgctggagccgccgaaggacatctgcaatgtcagcttgtcgtctgggtgctcggctgcccagtgcttctggaaggcggcgttgtagtccttgtagaaatcgcgcatcacgtcgtaggagacgttgagcagggtggtcgctgcctgggcggagcccgccagggccaggccggcggccagtagggaggcgctgaggatttttttcactgctcattccttgttgttcgagaagaggggaggcaatttgccagcgactatagccgggcccgcatagagctttaaagattaaaaagaactttgcttattccagtttgcgaaacagattgctgccacagcgcgcgcaaaatgcggcgttgggttcatggctgtccttcttgcacgctgggcattcagtgtgcagctgttcgccgcgcatggcactggccagctcggcggtaaaaatacctgttggcactgcgatgatcgagtaaccggtgatcatcaccagcgacgaaatcacctggcccaagggcgtcttgggcacgatatcgccgaagcccacggtagtcagggtgacgatggcccagtagatgcccttgggaatactggtgaagccatgttccgggccttcgatcacgtacatcaaggtgccgaacaccgtcaccagggtgcacacgctgaccaggaacaccacgatcttctgcttgctgccgcgcagcgcggccatcaggtagttggcctgcttgaggtacgggctgagcttgagcacgcggaagatacgcagcatgcggatgatgcggatgatcagcagatactgggcgtcgctgtagtacagcgcgaggatgccggggacgatggcgagcaggtccaccaagccataaaaactgaaggcatagcgcagcggcttgggcgagcaatacaggcgcaggccgtactcgatggcgaagatcagcgtgaagccccactcgatataggccagcacgtcggcgtagttctgatggattgtgtcgatgctgtcgagcatcacgatcaccaggctggcgaggatgatcagcagcaggatgccgtcaaagcgccgcccggcgacggtgtcgctttggaacaccatgatgtagaggcgctggcgccagtcgttgttgctgtccataaaccctgcctgaaacgaatatcgagcaagcctagggcgattcgaacgggctgtccatgtgaggcttgtgcagcattcgctgaccggcgcgcaccagccagcacgcgaggataaacggcgcggtcagcgcgggcaggtgtaggccggcaaagcccggggtgagcaggatggccaggccaatgcccagcagtggcaaccagggctggcgacgtgacgagcacagggccagggcggccagcgcggggttataactgtgcaggccgagcagggcgccagtggggtcattcagccaccagccggccagcatgccgagagtggcgccgcccaaggcccacgcggcggcgcggcggtcggccagcagcaagcccagggcgatcagtacacccgccaggggctggtccagcagcatgatttgcccaaggccggcgaagggcgcggccactacagcgacagtgtcgggctcgatcagtgcaagggtgttttcaggactctggccgagcagcaaccaacccagacccacaaagggcgcggtataggccggtaaatcctggggctgggtcgcgtgtttcaaccagtgccgggtgaggatggcactcaagccgccgcacgccaggatcagcggcggcaccagcgccgaccaggcaaagtgctggctgatcaacaggcccagcagtacgccgttgtaactatacagcccggcctggcgctcggccttgggatacccccggcgctgggccgtgagcaaccctgcgactccccccagcaaggccccgccaagcaaggccggggcgccgatcagaatcgccagcagacacagcagtccgcacagcggatggcgctgcaggaagatttggctgaagccgttgagcagggcttcggcccagtcggggcaggttgggttgtgcatttgggttgagtcaataagaccgagttgccctcatcgcaggcaagccagctcccacatttgattgatgttcgacatgcaaactcgatcaaatgtgggagccgggcttgcccgcgatgaggccctgacaggcgctaaatcagcgtctctatacgcagcgaattggtggaccccggctgcccgaacggcacccccgcggtaatcaccaaggtatcgccacgctgcgccatgccctgggcctgggcaatttccagcgcggtggaacacacctcatccacctggcgcagccgatcattgaccaccgagtgcacgccccacgccacgctcaggcgtcgcgccgtggacaagttgggcgtgaggttgaggatcggcgcaaccggccgttcccgcgccgcgcgtaagctggaactgccggactcgctgtagttcaccagcaccgccaccggcaggatgctgctgatgcggcggatcgcacagctgatggcgtccgacaccgtggcatccgccttgggccggctgacatccagctgcgcctggtagtccgggccgttttccacttggcggatgatcttgctcatcatctgcaccgcttccagcgggtactcgcccgaggcggtttccgctgacagcatcaccgcatctgcaccttcggccaccgcgttggcgacatcggtgacttcggcgcgggtgggtgccggcgagaagcgcatggattcgagcatctgcgtggccaccaccaccggcttacccagttggcggcaggtgctgatgatgtctttctggatctgcggcacgctctcggccggcacttccacacccaaatcaccccgggccaccatgatcgcgtcgctcagttcggcgatttcttgcagccgctgcaccgccgaaggtttctcgatcttggccatcagaaacgctttatcgccgatcagttcgcgggcttcgcgaatgtcttccgggcgctgcacaaacgacagcgccacccaatccacacccagctccaggccgaagctcaggtcgcgacggtctttggcggtgagtgggctcagttccaacagcgcttgtgggacgttcacacctttgcggtcagacagttcgccgccattgagcacggtggtgtcgatggcgtcggcatgcttggtgatcacgcgcaggcgcagcttgccgtcgtcgagcagcaggtccatgcccggctccagggccgcgatgatttccgggtggggcaggttgacccggcgttggtcgcccagggtttcatccaggtccaggcgcagggcctggccgcgcaccagttgcaccttgccctcggcaaagcgtcccacccgcagcttcggcccttgcaggtccatgaggataccgagcgggtagttgagctggcgctcgacctggcgaatccactggtagcgctgggcatggtcggcgtggtcgccgtggctgaagttgaggcggaagatattcaccccggcctccaccagctcaaggatgtcgtcgataccgtcggtggccgggcccagggtggcgaggattttgaccttcttgtcaggcgtcatggttggcagtctcaaggatcaggatggcgcgcaagtcgttgacgttggtgcgcgtcggctcggtgacgatcaagtcgcccagggcggcgaaatagccgtagccgttgttgttgtccagctcatcactggccgacaagcccagggcttcggcacggcggtagctgcagggggtcatgatcgcgccggcgttgtcttctgaaccgtcgatgccatcggtatcgccggccagggcgtacacgccgggcaggcccttgaggctgtcggtgaggctcaagaggaattccgcattgcgcccgccacggccgtcgccgcgtacggtgacggtggtttcgccccccgaaagaatcacgcacggcgccgccaatggctggccgtgctgcacgatctgccgggcgatgccggcgtgtaccttggccacatcgcgggcttcgccttcaaggtcaccgaggatcagcgggctgaaaccggactggcgtactttgaccgccaccgcttcaagcgattgctgcgggcgggcgatcaattggaagtggctgcgggcaagcaccgggtcgccgggcttgacggtttccgaggcggggttgttaagccaactgcgcaccgaagcgggggcgtcgatgtggtagcgcttgaggatcgccagggcctgttgcgaggtgctcgggtcgccgaccgtcgggcccgaggcaatcaccgtggcctggtcacccggcacgtcggagatcgcgtaggtgtacaccgtggccggccacgcggccttggccaagcgcccgcccttgatcgccgagaggtgcttgcgcacgcaattcatctcgccaatggtggcgccggatttaagcagggctttgttgatggcttgcttgtccgccagggtgatgccctcggcgggcagggcgagtagtgccgagccaccgccggagagcaggaagatcacgcggtcgttttcgcccagatggctgatcagttccagcacgcgctgggccacggcaaggccggctgcatccggaaccgggtgggcggcttcgactacttcgatttttttgcatggcgcgccgtggccatagcgggtgaccaccaggcccgagacttcgccctgccaacagtcttcgacaaccagcgccatggcggccgcggctttgccggcgccgatcacgatcacacggccactgcggtcggcaggcaggtagggttcgaggacttgccgggggtgggcggcgtcgatggctgtggcaaacagctcgcgaagcaggtgttgcggatcgaccgacataagcgggctcccgggggattcttgttattagaggtgcagcgatcgttcccacgctctgcgatgcagtccgggacgctctgcgcccaaagcgtgacgcgaagcgtcacaagaggcattcccacgcggaacgtgggaacgatcagcggtgtgggttatttatcgcgaatcgagaagttcgccatatgctccaggcccttgatcagtgccgagtggtcccagttgccgccgccaattgcggtgcaggtgctgaacacttgctgggtgccggcggtgttcggcaggttgatccccagttccttggcgccggccaatgccaggttcaggtccttctggtgcaggttgatgcggaaacccgggtcgaaggtgcccttgatcatgcgctcgccgtgcacttccaggatcttggacgatgcaaagccacccatcagcgcttcacgcaccttggctgggtcggcgccgtttttggaggcgaacaacaacgcttcggccaccgcctggatgttcagggcaacgatgatctggttggccaccttggcggtctggccatcgccattgccgcccaccagggtgatgttcttgcccatgctctggaacagcggcagtgcgcgttcaaaagtctgcggctcgccgccgaccatgatgctcaaggtgccggccttggcgccgacttcaccaccggacaccggggcgtccaggtactgcgcgccggcctggttgaccttggcggcgaacgctttggtggcggtcggggagatcgagctcatgtcgatcaccaccttgttcggtgacaggcccgcagccacgccgtcggcgcgaaacagcacgtcatcgacttgtggggtgtcgggcaccatgacgatgatgaactcggcttcctgggccacttgttgcgggttggccagggccacggcgccggcgctgatcagttcagccggtgccttgccgtgatgttcggagagaaacagttgatggcctgctttctgcaggttggcggccatgggttggcccatgatgccggtgccgataaatccgattttagccatgatcaaaatcctcttttaatgtgggagctggcttgccagctgccacattgtttggtgtcgtgtctgttgtcagatggcgttatgggtcttgagccaacccaaacccgcctcggtggtggtcaacggcttgtactcacagccgacccaacccgcgtaaccaatgcggtccagatgctcgaacaggaagcggtagttgatctcaccggtccctggctcgttgcgccctgggttgtccgccagttggatgtggttgatctcgcccaggtgcgtcgccatggtccgcgccaggtcgccttccatgatttgcatgtggtagatgtcgtattgcaggaacaggttggcgctgcccacttgctcgcgaatcgacagggcctgcgccgtgttgttgaggtagaagcccggaatgtcgcgggtgttgatcatctccatcaccagcttgatacccgctgcctgcagcttttcggcggcgtacttgaggttggcgacgaaggtcttttctacggtctcgtcatcaacgccttgtggccggatacccgccaggcagttgacctgggtgttgcccaatacctgggcataggcgatagccagcttgaccccggcacggaactcctcgacccggtccgggtggcaagccaggccgcgttcgcccttggcccagtcaccggctggcaggttgaacagcacctgggtcaagccgttggcgtccagctgcgccttgatgtcggcagagctgaactcatacgggaacaggtactccacgccttggaaaccggcatcggcagccgctttgaagcgagcaaggaaatcctgttcggtaaacagcatggacaggttggcagcaaagcgcggcatagggttctccttaatcgagcagggaaatggcagtcggcgcatcgttgccgaccagggccagatcttcgaattcattgacggcgttgatctcggtgcccatggaaatattggtcacccgttccagaataatctcaacgatcaccggcaccttgaattcttcgatcatctcttgggcgcggcgcaaggccggttggatctggcctggctcgaacacacgcagcgccttgcagcccaggccctcggcaaccgccacatggtcgacgccatagccgttgagttccggggcgttgaggttgtcgaaggacagctgcacgcagtagtccatctcgaacccacgctgggcttggcggatcaggcccaggtaagagttgttcaccaccacgtggatgtacggcagcttgaactgcgcgcccaccgccagttcttcgatcatgaactggaagtcatagtcgcccgacaaggccaccactttgcggctcgggtcggccttgaccacgcccagcgctgccggaatggtccagcccaatgggccggcttggccgcagttgatccagtgacgtggcttgtacacatgcagaaattgcgcgccggcaatctgcgacaggccgatggtgctgacgtagcaggtgtctttgccgaacacctggttcatctcttcgtacacgcgctgcggcttgaccggcacgttgtcgaagtgagtcttgcggtgcagggtggccttgcgctgttggcagtcatgcaaccaggcactgcggtccttgagcttgccggcggctttccactcgcgggccacttcgatgaacattgtcagcgcggagccggcgtcggaaacgatgcccaggtccggcgtgaacacgcggccaatctgggtcggctcgatgtcgacgtgaatgaatttacggccctcggtgtacacctcgaccgaaccggtgtgacggttggcccagcggttgccgatgcccagcaccacgtccgacttgagcatcgtggcgttgccgtagcggtgcgaggtttgcaggccgaccatgcccaccatcagcgggtggtcgtccgggatcgtgccccaacccatcagggtcgggatcaccgggatgccggtcaactcagcgaactccaccagcaactcgctggcgtcggcgttgatcacgccgccaccgctcaccagcagtgggcgttcggctgcatcgagcagggccagggctttttccacctgcacacgggtcgccagcggcttggccagaggcagcggctggtaggcgtcgatgtcgaattcgatctcggccatctgtacgtcgaacggcaggtcgatcagcaccgggcccgggcggccggagcgcatttcatagaaggctttctggaacgcgtaaggcacttggccgggttccagcaccgtggttgcccacttggtcaccggtttgacgatgctggtgatgtccacggcctggaagtcttccttgtgcatccgggcgcgaggggcttggccggtgatgcacaggatcgggatcgagtcggccgaggcgctgtacaggccggtgaccatgtcggtacctgccgggccggatgtgccgatgcacacgccgatattgccggccttggtgcgggtgtagccctcggccatgtgcgaggcgccttcaacgtggcgagcaaggacgtgatcgatgccacccaccttctgcaaggccgaatacagcgggttgatcgcggcgcctgggatgccgaaggcggtatccacaccttcacggcgcatcaccaggacggcggcttcgattgctctcattttgctcatggttttggtgcctcttgcgttttgtaattgtatacaagtggtgtctgtccaaagtgtattcacggcgagcggcgttggtcaatgcctttcgtaaactgacctttgcgttcgtcggaagcgcttttttcgacgtatggagcctttgttggaaaatattgtatacaaaaacaaatatcattgtgttctatttgtgtgatcgagcatctgatcaaacagacctcaccgcgttacccataacaagataaggacggcacctatgagcgctttaaccttgaaactcgccacccaactggccacccaggccctcaccgcaggccgcaccatttcggctgcgccactgaccatcgccgtgctcgacagcggcggccacctggtcgccctgcagcgcgaagacggcgccagcctgctacgcccgcaaatcgccatcggcaaggcctggggcgccatcgccctgggcaagggttcacgtttgctggcgctggacgcccaacagcgcccggcgtttatcgcggcgttgaacagcctggggcagggcagcgtcgtgccggcgccgggtggggtgttgattcgggatcagagcggcatggtgctgggcgcaatcggaatcagcggggacacgtccgatattgacgagcagtgtgcgatcacggcgatagagggagtggggttgatggcggatgcgggggtgtcggcttgaatcgttctgactgtgagtaagctatcgcaggcaagccagctcccacattggcggtgttcacaaatccaactgtgtgaatccaatcagtgtgggagctggcttgcctgcgatgcagtcgactcggtctacagtcaaacccaaatagcatcccacagcggatagtcgccaaacttctttaccagcccggccctgagtggattggctacgatgtagcgtgcaatcccctcaaggctttcctcgcgacgcacggcatgatcatgaaaacccggttgccagaggcgaccttggcggccagccaccgcattcacaattcgggggctcttggacttcacttgtcgcatcaagtcggcaagcgaacctttctccagagaaacaagccaatggaaatgatcaggcatcactacccaggccaatgaggttgcgagccctttacattgagcgatcctgaattggtgtacgaccagacggccgggtctgaagtcggtgaagatgggctcacgttcaagggtgtttgtggtgagcaggtaaatgcggttggattcgttatagcggccgatgcgcaggcgttttgaagcaggtagatcaggcattccttggcctctcttcagatggggttctgagaggctagatctcggtggctgaggctgttctgtgagcttttggcaggatgtttctgggagggcgctatcgcgggcagcccgctcccacagggggtttgcggtgttcatacatagtgtgtacgacgctggacgatgtgggagctggcttgcctgcgatagcctctgcgcggtctatcaatccggctcacaccccttgagcaccaaccgaataatcgtctgcgccgccgcctcataatcggcttcatccagcttggccttgccggtcactgccgagatctgccagtcgaaatcggcataggtctgggtggctgcccagatgctgaacatcaggtggttggggtctatcgctgcgatcaggccacggtcaacccagctctggatgcagtcgatattgtgcttggcctgggcattgagctgttcaacctggtcggcgctcaggtgtggggcgccgtgcatgatttcgctggcgaacaccttggaggcgaacggcaggtcgcgggagatgcggattttggagcggatgtagttgctcaacacctccttgggctcgccgtcgggattgaacggcgtagaggcggccaggatcggctcgataatgctttcgagcacctcgcggtagaggttgtccttggacttgaagtagtaatagacgttgggcttgggcagcccggccttggcggcgatgtcgctggttttggtcgcggcgaagcccttgtcggcaaactcctcgctcgccgcccgcaggattttttctttgttgcgctcgcgaatgctgctcataaaccagacgtttccttgccatgacaggcggttgcgcatggtagcaccggccatccgcaggcctcaacaatctgcccacaaggccttgcgccgcgttatgctcgcgccatctctctctaatggaagtccggttcatggcaggaagcagcttgttggtgttgatcgacgatatcgccgcggtactcgatgacgtcgcgctgatgacaaaaatggccgccaagaagacatcgggcgtgctcggcgatgaccttgcgctgaatgcccagcaggtctccggcgtgcgcgccgagcgggaaatccccgtggtgtgggcggtggccaagggctcgtttatcaacaaattgatcctggtgccgatggccctgttgatcagcgcctttgcaccctgggcggtgataccgctgttgatgctcggcggcgcctatctgtgtttcgagggcttcgaaaaactcgcccacaaattcttgcacagcaaggcagaagaccaggccgaacacgcacaattgactgaggcggtagccgacccggcaaccgatctggtggcgttcgagaaagacaagatcaagggcgcgatccgtaccgactttattctgtcggccgaaatcattgccatcaccctcggcatcgtcgccgacgcgcagctcacgcagcaggtgatcgtgctgtcgggtatcgccattgtcatgaccatcggcgtatatggattggtggccggtatcgtcaagctcgacgacctggggctgtggttgacgcagaagccgggtcaggtggcgcgaagtattggcggcgcgatcctgagcgcggccccctacatgatgaagagcctgtcagtgatcggcaccgcggcgatgttcatggtcggtggcggcatcctcacccatggcgtgcctgtggtgcatcattggatcgaaaccgtgagccagagcaccggcgcgttcgcgtggctgatgccgacgctgcttaatgcggtagcggggatcattgccggcgctgtcgtccttgcagtggtcagcgtggcaggtaaaggttggaaagcactgcgagggtgaaaccgcaggcataaaaaaggccattcaatcgaatggcctttttttatcgctgctgtttactcggcgatctgcaacttgcgcgattcggtgtagatataccgcaccttctcatactcgaatggcgagttcatctggccgtagcggaagctggtctggtagcgcttgtccacggcgcgcagggcccagacttccgggtggttggagctgacttcagacacgttgaggaagttgatctgcgattcggcgctgtagtccaccagcaggccgccggtgtcacgcaggttcgacgggccgaagatcggcagcatcaggtaagcaccccccggtacaccgtagaagcccagggtctggccgaagtcttcgctctggcgcggcaggcccatggcggtggccgggtcccacaggcccgcgatgccaatggtggtgttgaccagcaggcgcccggtggtttccagggagcggtggcccttgagctgcaacaagctgttcatcaggttaggcacatcgcccaggttgttgaagaagttgctcacgccggtgcgcagaaagctcggcgtgacatagcggtaaccgttcaccaccggcaggaacacccactggtcgaagcgatagttgaagtggtacacgcggcggttccacgactccagtgggtcgtagacgttgagcgcggtgagcgtggaacgctcgaattcgcgctggtccaagcctgggttgaacttgagcttggtcagcggctccttgaagccgtcggcatcgaccttgacgggttcttgggccttgctgttgtcggcattggccccgcctgcgcacatcagtgcggcgagcagcagaagatatttagccacggaagaactccagcatggcgtcggcgttgacgcggtaattaaggttgccgcagtggccgcccagcgggtagacggtcaagcgatcgccgaaagttttacgcaggaagcccaggtcgccagggccgaggatcacgtcgtcggcgttatgcatcacggcgattttcgggctgtcgcgcaggtagtccttgagggcgtagaggctgacctggtcgatcagttgcagcaggctgccgccatcggaacgcgcgcgccacattgggatcacttgttcggtgaggtagcagtcgaagtcgcactgcagggcacgcttgaggaacggcgtgaggctggtgccttcggtaatcgggtacttgggcggaataatcaggccacgtcggttgatcaagtccgaagtgaaggcaatgtcggcggccgagaagcggaacgaggtgccgatcagcatggccatctgttcattggtcaggtgctgcttggactgctggaagtcataaagcagggcatcgttaaggtcgatgtagcctttttgctggaagtaacgtgtcagtttgctcagcaccaactcatagaaagtggtgctgttgttgatgcccttgacctcggtctgtaccagcttgtcgaggttggtgatcgaggtgtagaggttgaccggcgggttgagcagcagcactttcttgaagttgaagctgcggcgggtctcgtccagcttgctgacaaacgccgcatccagggcgcccaggctgtagccggtgaggtagaaatcggtcacgggcaacgaggcgttctgtgcgcgcacggcctgcatcacgcggtacatgtcttcggcgtcttcctgggtgatgcccggggtggcgaagcgcgaagcggcgctgatgaagtcgaagctggtcggcgaggacagctgcaccacatggtagccggcctggtaatacagttttttcaggtattcgttgatgctgctgtcaaagcgtgcaccggtgccggcgatgaggaagatcaaaggcgcggcgcggtcctgcttggcaatgcggtaggtgagtttcttcaccgcccagaaattgtccggcaggctgaactcgcgctcggggcgcatcgtcagggtgtagtcggactggttgatctcgtcatcggtcggcagggttggccgcagatcgggaggtgtggtggcgatggtcgcttcgaacgggttggtcaaagggtagccatagctggcttggtcgatatcgacggccagtgctgacgcactcaaaaataggctgcccagcaaggcagcacagcgcaaggaacggagcatgacttaatccctaagaggaacgggctgaatgaagttcgcaggctatgaccaccgccttgtcaccgaagtgccagcactcggcacgaaaagtcggaaaaaaacgtcggaatcggggtaatagtagcgagacgatacactttgccatgctttgttgaacagatatctgtgcgaacaccttgctaacggccgccgtgggattaagctgggcgccgtttttgcctatcggagtgccccatgtcccgtcgtttgccgttgatcctgctgcttattgccctgccgttatggctggccgccagttatgccgcacgctatggcttcatggaggatgggcaatgggttggcatctgtgcggatgaggccagccgctgggagtgccaggtgcgttcgaatttgggtttgatgattcatttcaagctgttggggtgggcggcgttgatcacctcggtgctgggcttttttgtaccggggcgtgcggggtgggcgttggcggtggtggggttggtgttcgggttgccggcgctggcgttgtacaacacgacgtttgcggtgtttgcagtggtgattgcggggttgcggttggtcaggaagccgcgcggggcctgatgtggcctcatcgcaggcaagccagctcccacagttgaccgtgctcacagatagaaatgtgtgaacccaatcaacggtgggagctggcttgcctgcgatagcggtgtcaagccttgcgcactcgcaagcaacgccacaaagccgcaaccatcagcacgctgaccactgcccaaccccaggcctgctggttcaacagcccttcacggtacaactgcggcgcaatgccggcaccgatgataaaggccagcaatgcaatctcccgacgcggcccggttaccgggcgtaccaggtacaccagggccggcagcaccagcgctgcgcttgggaagctgcgatagcgcgggtcaaacaccagcgccagcatcatcaccgcaccggcaaacccggcgattgccaccagccagccggcgcgctgctccagccagtggaacccgcgctcacgccagccttcccgggcgctgagggccagggcggcgtgcgccagcaccagcaggttcaacaccaccagcaagcctgcccatacccattcatcgttgaagcgcgcggtaacgcgggtcagttcggcccaactgccgatggaacatgccgccacggcaccgagcaatggcagtattaacgcagagcgcgggctgcgaacgcggccgccgagcaccagggtgccaagcaggatgagcccgccgacgcccagccacagcggccagtacggcacattggtcacagggcctgcgagaacgcctttgtcctgacggtctgcatcgaacagcccccagtaaccgcccacagccccttcactggcgcgcttccatggctggtcaaaggcttcgatcaggttgtagcgccagccattggcttcggccatggccacgaagccacgcatgaacctggcttcattgacccggctgggcacggcggtttcgcgctggcgaccttcgctgggccagccggtttcgccgatcacgatgtccttgggcgcgaatttatggccgaaggtctggcgcacatcgcccacgtgcttgagcgcctggtcgatgccggatggctcatcttcccaatacggcagcaggtgaatggtcaggaagtccaccgccggctcgatttccgggtgttgcaaccaaaattcccagacatcggcataggtgacgggctgcttgatctggcttttaacctgatggatcagcgccaccagttgcttggcagtgacttccttgcgcagcagggcttcgttgccgacgatcaccgaggtcaccacgtccgggctggcgttggccgccgcgatcaactcgttgatctctttttgagtcgccacggggtcactgctgacccaggccccggccatcaccttcaacccatgcttgcgcgccatgtccggcagggcttccaggccggtcatggaataggtgcgaatgcattcaaaacgcgtggcgagcagcgccaggtcggcgtccatgcgctcggggcgcaacctgaacggctgatcgaacggggattggtccttgtcgaacggtgtgtaggacgcacattgcagcttatggctggcgctggcgacgtccggcaataccacgggccggccgaggccgtaccagtagccggcaagggcaagcacgccgaggatcaaggcaaagaaatagggcagggcagggaagcgggcagtcgcgggcatggtcggcttatctgggggagcaaaggcgcgcatcttacccggatttgccgcagcccagtgcggctgcataattttgacatgcaaacttcgggcgggattctggcgataacgcctacaaagcgtcctactggcgatgtgatgtcgtttcttgctcaaccaaggtcgctgacagagcagggcaaatgcctacgcaggttgaagataaaactgtcagtactccactgatgcctcagcaaccggatcgatgcgcgtgaagggggcgcggtgcaccctataacaacagtttgacgtcgctcggcatccgtcgggcgcagcactttcggggaagtactatgaagatgcgacgactcttgggcgcagctgccactctggtagttgcgatgggctcctcactggccagtgccgacagcaagaccctgagcatcggctacgtggacggctggtccgacagcgtggccaccactcatgtggcggcagaggtgatcaagcaaaagctcggctacgacgtaaaactgcaagcggttgccaccgggatcatgtggcagggcgtcgccaccggaaaactcgatgccatgctctccgcctggctacctgtaacccacggtgaatactggaccaagaacaaggacaaggtggtcgactacggccccaacttcaaggacgccaagatcggcttgatcgtgccggagtacgtcaaggccaagtccatcgaagacctcaagaccgataccaccttcaagaacaagatcgtcggcatcgacgccggttcaggcgtaatgctcaagaccgacgaagccatcaagcaatatggcctggactacaaactgcaagccagctcgggtgcggcgatgattgccgaactgacccgtgccgaagacaagcaggagtcgattgcggtcaccggttgggtgccgcactggatgttcgccaagtggaaactgcgtttcctggacgacccaaaagggatttatggtgctgctgaaacggtcaacagcatcggcagcaagggcctggagaagaaagcgccggaagtcgcggccttcttgaagaaattccagtgggcctccaaggatgaaatcggtgaagtcatgctggcgattcaagaaggcgccaagccggacgccgcggccaaggactgggtagccaagcaccccgagcgcgtcgccgaatggaccgctaaataaccccgccccaattgtaggagcgagcttgctcgcgaagaacgcataggcaccgcgatcatccagaatgaatgcgttatcgttgacgtttttcgcgagcaagctcgctcctacattttttacaaatcctcgctaagctcgatctactactaaggtcgtctggaacccattgcgcagccgcatacagtggatacgttccaaaataataaaaagctgtgctgcgaggataaaaacaatgaacgacagcatttacctctcgattcaaaacagcccgcgtttcaaggagctggtcaggaaaagggaaaggttcgcctggattctctcggcgatcatgctagggctttactccgctttcatcctgttgattgcctacgggccacaagtactgggggccaagatcagccccggttcctcgattacctggggcattcccctgggcgtcgggctgattgtgtcggccttcattctcaccggcatctacgtgcgtcgggccaacggcgaatttgacgacctgaacaatgcgattctcaaggaggctgcgcaatgatccggcgtctattggctctattcggtgcttcgctgttggctccggccgtttgggcggcggacgcattgaccggtgaagtgcacaagcaaccgctgaacatctcggccattgtgatgttcgtcgcgtttgtcggcgccaccctgtgcatcacttactgggcgtccaagcgcaacaaatcggcggcggactactatgcggcgggcggcaagatcaccggtttccagaacggtctggcgattgccggtgactacatgtcggcggcgtccttcctggggatttccgcgctggtgttcacctccggctacgacggcttgatctactcgatcggcttcctggtgggctggccgatcattctgttcctgatcgccgagcgcttgcgtaacctgggcaaatacacctttgccgacgtggcgtcctatcgcctggggcaaacccagatccgcagcctgtcggcctgtggctcgctggtggtggtggcgttctacctgatcgcgcagatggtcggcgcgggcaagctgatccaactgctgtttggccttgattaccatgtggcggtgatcctggtgggtatcctgatgtgcatgtacgtgctgttcggcggtatgttggcgaccacctgggtgcagatcatcaaggcggtactgttgctgtccggtgcctcgttcatggcgctgatggtgatgaagcacgtcaacttcgacttcaacatgctgttctccgaggcgatcaaggttcaccccaaaggtgaggcgatcatgagccccggcggcctggtgaaagacccgatctcggcattctccctggggctggcactgatgttcggtaccgctggcctgccgcacatcctgatgcgcttcttcacggtgagcgacgccaaggaagcgcgtaagagcgtgctgtacgcaaccggcttcatcggctacttctatatcctgaccttcatcatcggcttcggcgcgatcctgctggtcagcaccaacccggcgttcaaggacgcagcgggcgccttgctcggtggcaacaacatggcggcggtgcacctggccaacgcggtgggcggcagtatcttcctgggcttcatctcggctgtggcgtttgccaccatcctggcggtggttgccggcttgaccctggcgggtgcttcggcggtgtcccatgacctgtatgccagcgtgatcaagaaaggcaaggccaacgagaaggacgagattcgcgtgtcgaagatcaccaccgtagccttgggtgtattggccatcggcctgggtatcctgttcgaaagccagaacattgcgttcatggtcggcctggcgttctccatcgccgccagctgtaacttcccggtgctgctgctttccatgtactggaaaaacctcaccacccgtggcgccatgattggcggctggctgggcttgatcagcgccgtgggcctgatgatcctcggcccgaccatctgggtctcgatcctgcaccatgaaaaggcgatcttcccgtacgagtacccggcgctgttctcgatgatcattgcgttcgtcggcatctggttcttctccatcaccgacaagtcggcggcggcagagaaagagcgcgcgctgtacttcccacagtttgtgcgttcgcagactggcctgggggcgagtggggcggttaatcactgagttgtcagctgtataagagatgccccggtcgtaaggctggggtatttttttgcctgggtcttttgtgttgcctgggctggcctcatcgcgggcaagcccggctcccacaggttgactgtgtgaacccgatcgactgtgggagctggcttgcctgcgatggcgttagatcaggccacacaaacaaaaacggcctccactaagggaggccgttctcattacaaacatacaatcaagtgcttacttgcgatcttccagcttggtgatgtcacgcgactcgtagccggtgtacagctggcgcgggcgaccaatcttgtacgggctggagagcatttctttccagtgggagatccagcccacggtccgcgccagggcgaagatcacggtgaacatgctggttggaatgccgatcgccttgaggatgatccccgagtagaagtcgacgttcgggtacagcgagcgttcgatgaagtacgggtcggtcagggcgatctcttccaggcgcatggccagttcgagttgcggatcgttcttgatgcccagttccttcaacacttcgtcgcaggtctgcttcatgacggtggcgcgcgggtcgcggttcttgtagacccggtgaccgaagcccatcaacttgaacgagtcgttcttgtccttggccttggcgatgaatttgtcgatgttggacacatcgccgatttcatcgagcatggtcaatacggcttcgttcgcaccgccgtgggcagggccccacagtgcggcgatgccggcggcaatacaggcgaacgggttggcacccgaagagcccgccaggcgcacggtagaggtggaagcgttctgctcgtggtcggcgtggaggatgaagatccggtccatggccttggcgagcaccgggctgatcggtttgatctcgcacggggtgttgaacatcatgtgcaggaagttttccgcgtacgtcaggtcgttgcgcgggtacatcatgggttggcccatggagtacttgtaaaccattgcggccagggtcggcatcttggcaaccaggcggatcgcggaaatttcgcgatgctgcgggttattgatgtccagggagtcgtgatagaaggccgacagggcgcctactacaccgcacatgacggccatcgggtgggcgtcgcgacggaagccgttgaagaaggtcttcaactgctcgtgaaccatggtgtggttcttcacggtgctgacgaactgggctttctgctcggctgttggcaattcgccatttagcagcaggtagcaggtttccaggtagtccgacttttcagccagttgctcgatcgggtagccgcgatgaagcagaatgccattatcaccatcgatataggtgatcttcgactcgcaggaagcggtcgacatgaagcctgggtcgaaagtaaaacggcccgtggccgtcaggccccgtacgtcgataacatcgggaccaacggtgccggttaaaatgggcagctcgacgggggctgcgccctcgatgatcaactgcgcttttttgtcagccatgtggcctcctatttatgcttcaaatcatcagacagaccccccacgcagggcccgcaccactatattgatataaatccagatgtcaatttgcctaaagtcttgcgccagaaggctttaaccgtactttttcgtcgaaattgcctgccatttacgccttttatcccgccagcgcaatcagctattagggtgaggtgtgcgcgttgtcattagtaacctaactgtctatactcggccaccgaccgccaagggcttttgggcttgctttcattgggggtcgcactccctgggtggtgcttacctgaccagtcgcactccccaacaactttgccctgattgttaggggctcttcagtgtgaaaaaaagccgtgaatagccaacgacctgtaaacctagacctaaggaccatcaaactccccatcaccggcgttacgtcgttcctgcaccgtgtttccggcatcatcctgttcctgggcttgggcatcatgctttatgcattgagcaaatccctgggttccgaggaaggatacgccgaggtgaaggcatgcttgaccagcccgctggccaagttcgtagcatggggcctcctgtcctctcttctgtatcacctggtagccggtgtgcgccacttgatcatggacatgggcatcggtgagacgctggaaggcggccgcctgggctcgaaaatcatcatcgccatttccgtggtgctgatcgttctggcaggagtttggatatggtaaccagcgtaacgaatctgtcgcgttcgggcctctatgactggatggcacagcgtgtgtctgcggtcgttctcgcggcttatttcattttcctgatcggatacctcgtcgcaaacccgggcatcggctatgagcaatggcacggcctgttttcccacaatgcgatgcgaatcttcagtctgctggcccttgtagccctgggcgctcacgcctgggttggcatgtggaccatcgcgactgactacctgacgccgatggcgctgggcaagtccgcgactgcagtacgtttcctcttccaggcagtatgcggcgtcgcgatgttcgcttacttcgtctggggtgtgcagattctttggggtatctgattcatggctaacattccaactatttcattcgacgccatcattattggtggcggcggtgctggcatgcgcgctgcgctgcagctggcccagggcggtcacaagactgccgtgatcaccaaagtgttcccgacgcgctcccacaccgtatcggcccagggtggcatcacctgcgccatcgcctccgccgacccgaacgatgactggcgctggcacatgtacgataccgtcaagggttccgactatatcggtgaccaggacgctatcgaatacatgtgtcaggaaggcccggccgcggtgttcgagctggaccacatgggtctgccgttctcccgtaccgagcaaggccgtatctaccagcgcccattcggtggccagtccaaggattacggtaaaggcgggcaggctgcccgtacttgcgctgcgtccgaccgtactggtcatgcgctgctgcataccctttaccaaggcaacctgaaagccggtaccacgttcctgaacgagtactacgcggttgacctggtgaagaacggcaagggcgagttcgtcggcgtgatcgccatctgcatcgaaaccggtgaaaccacttacatccgcgccaaggctactgtgctggcgaccggtggtgcaggtcgtatctacgcttctaccaccaacgccctgatcaacaccggtgacggcgtcggcatggccctgcgtgctggcgtaccggtacaagacatcgaaatgtggcagttccacccgaccggcatcgccggcgccggtgtactggtgaccgaaggttgccgtggtgaaggtggttacctgatcaataagcacggcgagcgtttcatggagcgttatgctccgaacgccaaagacttggctggccgtgacgttgtggctcgttcgatggttaaagagatcatcgccggtaacggctgtggcccgaatggcgaccacgtactgctcaagctcgatcacctgggtgaagaagtgctgcacagccgcctgcctggtatctgcgagctgtccaagaccttcgcccacgttgacccggtagttgctccggttccggtggttccaacttgccactatatgatgggcggcgtgccgaccaacattcatggccaggcaatcacccagaacgccgacggccaggacgagatcatccatggtctgttcgcagtaggtgaagtggcttgcgtatcggttcacggtgccaaccgcctgggcggtaactcgctgcttgacctggtggtattcggtcgcgcggccggcctgcacctggagaaggcgctgaccgacggcatcgaatacgatgacgccaccgacgccaacattgaagccgccctggcgcgcctgaacgctctgaacgagcgcacagatggcgaagacgtagcgaccctgcgtcgcgagctgcaaaactgcatgcagaactacttcggtgtgttccgtaccggcgaatacatgcagaagggtattgcccaactggctgacctgcgcaagcgcatcgccaacgtcaagatcaacgataagagccaggcgttcaacaccgctcgtatcgaagcccttgagctgcaaaacctgctggaagtggctgaagcgacggcgatcgccgccgaggttcgtaaagagtcccgtggtgctcacgctcgtgaagactttgaagatcgcgacgacgaaaactggttgtgccacaccctgtacttcccgggtgacaagcgcgtaaccaagcgtgccgtgaacttctcgccgaagacggtgccgacgtttgaaccgaagattcggacttactaagggtggctgccatgttgaaagtcagtgtttatcgctacaaccctgatcaggacgctgcgccgttcatgcaggagttccaggtcgataccggtggtaaagacctgatggtgctggatgtactggcactgatcaaagagcaggacgagggtttctcctatcgtcgctcttgccgtgaaggtgtgtgcggttccgacggcatgaacatcaacggcaaaaacggcctggcgtgcatcacgccgctgtccgccgtggtcaaaggcaacaagctgatcgttcgtccactgccaggtttgccggttatccgtgacctggtcgtcgatatgagcatcttctacaagcaatacgagaaagttaagccgttcctgcagaacgacacgccggctccggccatcgagcgtctgcagtccccggaagaacgtgaaaagctcgatggcctgtacgagtgcatcctgtgcgcttgctgctcgacatcctgcccgtccttctggtggaacccggacaagttcctgggtccagctgccctgctgcaagcctaccgcttcctggcagacagccgtgataccaagacgtccgagcgtctggcttcgctggatgacccgttcagcgtattccgctgccgcgggatcatgaactgcgtcaacgtatgtcctaaaggcctgaacccgactaaggccattggtcacatccgtaacatgctgctgcaaagcggcgtgtaactgacgttgtagtaaagcaggaccgttgtgcccgtaaatgctgcggcgcaggcttcaaccggcgccgtagttttaacttgagcagcgacttacaaagccgcggctcttattttgaagaaatgagacaagcaggggcattcgggttggtacccgaactatcagcgtgatcctaagtggcttgttttggtcgctgcacttggccttttgcaagcaaactcggtgttttcgccggtggtgtccccaaatcgagggtgaccaagcatgcaagaaagcgtgatgcagcgcatgtggaacagcggctatctttcaggtggtaacgctgcctatgtggaagagctttatgagctctacctgcacgaccctaacgctgtgccagaagaatggcgcaccaaatttcagacgttgtcttcagacggcaacgctgccaccgatgtatcgcacgcaacaattcgcgatcagttcgtgctgctggcaaagaaccagcgccgcgcccaaccggtttccgccggcagcgtgagcagtgagcatgagaagaagcaagttgaagtactgcgactgatccaggcctaccgtatgcgtggccaccaggcagcccagcttgacccgctggggctgtggcagcgtcctgcacctgcagacctgtcgatcaatcattacggcttgaccaatgccgatcttgatacgaccttccgtgccggcgacctgttcatcggcaaagaggaagcgagcctacgcgaaattcacgaagcgttgcagcagacatattgccgcaccatcggcgctgaattcacgcacatcaccgattccgagcagcgccactggttccagcaccgcctggaaggcgtgcgtggccgtccggtattgtccgccgatgtgcgcggccacctgctggagcgcgtgaccgcggccgaaggcctcgagaaatacctgggcaccaaatacccaggcaccaagcgtttcggcctggaaggcggcgaaagcctgattccgatgctcgacgagctgatccagcgttccggttcctatggcaccaaggaaatcgtgatcggcatggctcaccgtggtcgcctgaacgtgttggtcaacaccttcggcaagaacccgcgtgagctgttcgacgagttcgaaggcaagaagaaggtcgagctgggttccggtgacgttaaataccaccagggcttctcgtccaacgtgatgaccaccggcggtgaagttcacctggccatggccttcaacccctcccacctggaaatcgtttcgccagtggtcgagggttcggtacgtgctcgccaggatcgtcgtaacgacgccaccggtgagaaagtgctgccgatttccatccacggtgacgcggcattcgccggtcaaggcgtggtcctggaaacgttccagatgtcgcagacccgcggcttcaagaccggcggtaccgttcacatcgtcatcaacaaccaggtgggtttcaccatcagcaacccgttggatgcgcgctccaccgagtacgccaccgacgttgccaagatgatccaggcgccgatcctccatgtgaatggcgatgatccggaagccgtgctgttcgtgacccaactggctgtcgactaccgcatgcagttcaagcgcgacgtggtcatcgacctggtttgctaccgccgtcgcggtcacaacgaagcggacgagccaagcggcacccagccgttgatgtaccagcagatcaccaagcagcgcaccacccgtgagctgtacgccgaaagcctgaccaaggccggcgtggttgacgaagcgcgtgttcaggcgaaagtcgacgaataccgcaacgcgctggacaacggcctgcatgtagtgaaaagcctggtcaaggaaccgaacaaagagctgttcgttgactggcgcccctacctgggtcacacctggactgcacgtcacgatacctcgttcgatttgaagacgttgcaggaactgtccgccaagctgctggaaattcccgaaggcttcgtcgtacagcgccaggttgcaaagatctacgaagaccgtcagaagatgcaagccggcggcctgccgatcaactggggttacgccgaaaccatggcgtacgcgaccctggcgttcgaaggtcacccgatccgcatgaccggccaggacatcggccgcggtacgttctcgcaccgtcatgctgtattgcacaaccagaaagacgcgggcacctacatcccgttgcagaacctgtacgaaggccagccgcgtttcgatttgtacgattcgttcctgtccgaagaagccgtactggcgttcgaatacggttactcgaccaccacgccgaatgcgctggtgatctgggaagcccagttcggcgacttcgccaacggtgcccaagtggtgatcgaccagttcatcaccagcggcgagcacaagtggggccgtctgtgcggtctgaccatgctgctgccacacggttatgaaggtcagggcccggagcactcctcggcccgtctggagcgttacctgcaactgtgcgccgagcacaacattcaggtgtgcgtgccgacgaccccggcccagatctaccacttgctgcgccgccaggtgatccgtccgctgcgcaagccgctggtggtgctcacgccgaagtcgctgttgcgccacaaactggccgtttcgaccctggaagatctggcccaaggttcgttccagaccgtgattccagagatcgacacgctggacgccgccaaggtcactcgcctgatcctgtgcagcggcaaggtctactacgatctgctggaaaaacgccgtgccgaaggccgcgaagacatcgccatcgtgcgtatcgagcagctttatccgttcccggaagatgacctcatggagatcatcgcgccttacaccaacctcacgaacgtggtgtggtgtcaggaagaaccgatgaaccagggcgcctggtacagcagccagcatcatctgcgtcgcagcatcggcaaccacaacaaggccctggtccttgagtacgccggtcgtgatgcttctgctgcacctgcctgtggttatgcgtcgatgcacgccgagcagcaggaaaaactgctgcaagatgctttcactgtttaacgccttcgcgctgactgaaaccgaattttaaggacctacagataatggctatcgaaatcaaagccccgtcattcccggaatcggttgccgatggcaccgttgccacctggcacaagaaaccaggcgaggccgtcaagcgtgacgacctgatcgtcgacatcgagaccgacaaagtcgtactggaagtgttggccgaagctgacggcgtgctgggcgcgatcgttgctgaagagggcgctaccgttctgtcgaaccaggtactgggttcgatcgaagagggcagcgctgctgccgctcctgctcctgccgccgctgcaccggctgcttctgcccctgctgcaccggctgcgggtggcgaagacccaatcgctgcaccggctgcgcgtcaactggctgaagaaaacggcatcaacctggcttccatcaagggcaccggcaaagatggccgtgtgaccaaggaagacgtggttgccgccgttgaagccaagaagaacgctccggctgccgcacctgccaaggctgcagcgcctgctgccgctgcgcctgtgtttgccgctggcgaccgcaccgagaagcgcgtaccgatgactcgtgtacgtgccaccgtggccaagcgcctggttgaagctcagtcgaacatggcgatgctgaccaccttcaacgaagtcgacatgaccgaagtcatggccctgcgttcgaagtacaaggacctgttcgagaagtcccacaacggcgtgcgcctgggcttcatgtcgttcttcgtgaaagcggccaccgaagcgctgaagcgcttcccggcagtcaacgcttccatcgacggcggcgacatcgtttaccacggctactcggatatcggcgttgccgtctccagcgaccgcggcctggtggttccagtcctgcgtaacgccgagctgatgagcctggccgaaatcgaaggcggcatcgctggcttcggcaagaaagcccgtgacggcaagctgaccatcgacgagatgaccggcggtaccttcaccatcaccaacggtggtaccttcggttcgatgatgtcgacgccgatcgtcaacccaccgcaagccgcgatcctgggcatgcacaacatcatccagcgtccgatggccatcaacggccaagtcgtgatccgcccaatgatgtacctggcactgtcttacgatcaccgcctgatcgacggtaaagaagccgtgacgttcctggtgaccatcaagaacctgctggaagacccggctcgcctgctcctggacatctgatagaagcagttgcacgttgcgagctgcaagctgtaggaaaaagcagcttggcttgcaacgtgtgactagaagcttgtcgcaaatagaggatctattttcatgacacagaaatttgacgttgtagtgattggtgcaggccctggcggctatgttgccgccatcaaggccgcgcaactgggcctttccactgcttgcatcgaaaaatacaccgacaaggaaggcaaactggcgttgggcggtacttgcctgaacgtaggttgcattccatccaaggcgctgctggacagctcctggaaattccacgaagcccaagacggcttcgcgatccacggcatcaaccatgctggcgtgaccatggacgtgccagccatggtcggccgtaaagccaacatcgtcaaaggcctgacttccggcgttgccaccttgttcaaggccaacggcgtgacttccattcaaggccacggcaagctgctggccggcaagaaagttgaagtcaccaagccagacggttcggttgaagtcatcgaagccgaaaacgtgatcctggccccaggttcgcgtccaatcgacattccacctgcacctgttgataacaacgtgatcgttgattcgaccggcgccctggaattccaggctgtgcctaagcgcctgggcgtgatcggcgccggcgtgatcggcctggagctgggttcggtatggtcccgcctgggcgctgaagtcaccgtgctggaagccctggacacgttcctgctggctgccgacaccgcggtgtccaaggaagcgctgaaaaccctgaccaaacaaggtctggacatcaagctcggcgcccgtgtgaccggttcgaaggtcaacggcgaagaagtcgtagtgacctacaccgataaagacggcgagcagaccatcactttcgacaagctgatcgttgccgtgggccgccgcccagtgaccaacgacctgctggcttccgacagcggcgtgaacatcgacgaacgtggtttcatccacgttgacgatcattgcgctaccaccgtgcctggcgtctatgccattggcgacgtggttcgtggcatgatgctggcccacaaggcttccgaagagggcatcatggtcgttgagcgcatcaagggtcacaagacccagatgaactacgacctgatcccatcggttatctacacccacccggaaattgcatgggtcggcaagaacgaacagcagttgaaagctgaaggcgttgaagttaacgtcggcaccttcccgtttgccgcttctggccgtgccatggcagctaacgacaccggtggttttgtcaaagtcatcgctgatgccaagactgaccgcgtattgggcgtccacgtgattggcccaagcgctgcagaactggttcagcaaggcgcaatcggcatggaattcggcaccagtgccgaggacctgggcatgatggtcttctcccatccgaccctgtccgaagcgttgcacgaagccgcgttggcagtgaatggcggcgccatccacatcgccaaccgcaagaagcgctaagcgagataataagaaaccacggcggagttgcccgtcgtgagccttgcgcgcaagactcaccgcggaatatccgctggacgcagccttgtgcagctttacgggccataagccccgcaagttgcgcaagcagcagtcacaggtggcgcggcactcataatgagcgcagcgccgaatgcgcagtacctaacgaagacggtaaaaagcatgaatcttcacgagtatcagggtaagcagctgttcgctgaatacggcctgccagtttccaagggctacgcagtagacaccccggaagcagcagcagaagcttgcgacaaaatcggcggcagcgagtgggttgtcaaagcccaggtccacgccggtggtcgcggtaaagcgggcggcgttaagctggttcgcagcaaagaagacgccaaggccttcgcacagcagtggctgggcaagcgtctggtgacttaccagactgatgccaatggccaaccagtcaccaagatcctggttgaatcgtgcactgatatcgctaaagagctgtacctgggcgctgtcgttgaccgttcgagccgtcgcatcgtgttcatggcttccaccgaaggtggcgtggacatcgagaaaatcgctcacgaaaccccagaaaaaattctgaaggccactatcgatccactggttggcgcacagccattccagggtcgcgagctggctttccagctgggcctggaaggcaagcaagttgcccagttcgccaaaatcttcgttggtctggccaaactgttccaggatcacgatctggccctgctggaagtgaacccgctggtgatcaaggctgacggcgatctgcactgcctcgacgccaagatcaacatcgacgccaacgccatgtaccgtcagcctaagctgaagactttccacgatccgtcgcaagacgatccgcgcgaagcgcacgctgccaagttcgaactgaactatgtagccctggaaggtaacatcggctgcatggtcaacggtgctggcctggccatgggtaccatggacatcgtcaacctgcatggcggcaagccagccaacttcctcgacgtaggtggtggcgctaccaaggaacgcgttaccgaagcgttcaagatcatcctgtccgactccaacgtcgctgcagtactggtcaacatcttcggcggcatcgttcgttgcgacatgattgccgaaggcatcatcggtgcagtgaaagaagtcggcgttaaaatcccggttgttgttcgcctcgaaggtaacaacgctgaactgggcgctaaagtactggcagaaagcggtttgaacatcatcgcggctaccagcctgaccgacgctgctcaacaagttgtcaaagctgcggagggcaagtaatgagcgtcctgatcaataaagacaccaaagttatctgccagggtattaccggttcgcaaggtagtttccacacccagcaagccatcgagtacggcacccagatggttggcggcgtaactcctggcaaaggcggcaccgagcacctgggcctgcccgtgttcaacaccgtgaaagaagccgtagaagccactggcgccaccgccagcgtgatctacgttccagctcctttctgcaaggactcgatcctggaagcggcattcggcggcatcaagctgatcgtctgcatcaccgaaggcattcctaccctggacatgctggacgctaaagttaagtgcgacgagctgggcgtagtcctgatcggccctaactgcccaggcgtgatcactccaggcgaatgcaagatcggcatcatgccaggtcacattcacttgccaggtaaagtcggtatcgtttcccgttccggcaccctgacctacgaagctgtgaagcagaccactgacgccggtttcggtcagtcgacttgcgtcggcatcggcggtgacccgatcccaggctccaacttcatcgacatcctgaagctgttccaggaagacccgaagaccgaagcgatcgtaatgatcggtgagatcggcggttcggctgaagaagaagcggctgcctacatcaaggcccacgtgaccaagccggttgtttcctacatcgctggtgtgactgcccctgcgggcaagcgcatgggccatgctggcgcaatcatctctggcggcaaaggcactgcagacgagaaattcgctgcactgcaagacgcaggcgttaaaaccgtgcgttcgctggcagacatcggcaaggccctggctgagctgactggttgggctgtcaagtaagcctcgcgcttagctgacgcttcaccccacaaaggccaccttcgggtggcctttgtgcattctgggtatacgcagatttggggatgtactcggttcaatgtgggagctggcttgcctgcgatgcagacacctcggtgcatcagccaaaccgagtcgatgctatcgcaggcaagccagctcccacagggttgtgtattgcccaattaagtatgaaaacgcgacattgaaatgtcgcttatcggacagtccgccccgcaacagtgcgtttgtcaggctaattctgtactctagccgcctctttatgcgtccgcgtcccaaaaggaagctgcgcgctagaccggtcggtccccacaagggccggcagcatttccctcatccatagggaagccctctctaaattccgattcagtagtgtggtatttcctcaaatgaaagtgttgaaaagccaggatatcctggcgctgggctttatgacctttgccctgttcgtgggcgccggcaacatcatcttcccgcctatcgttggtttgcagtccgggccgcatgtgtggatggcggcgctgggctttctgatcaccgcagtcggtctgccggtggtcaccgtgatcgccctggccaaggtcggtggtggcatggatgcgctgagcagcccgattggcaagatcgccggtggcctgctggcggcagcggcctacctggccgtgggcccgctgtttgcgaccccgcgcaccgcaaccgtgtcgtttgaagtgggcttggcgcccttgaccggtgaaagcccgttggcgctgttcctctacagttcggtgtatttcttggtggtgttctttgtctccctgtacccaggtcgattgctggacaccgtgggccgtttcctggcgccgctgaaaatcatcgccctggccattctcggcatcgctgcgtttgccttgcctgcgggtgaggtaggggttgccacgccggaatacgttgccgcgccattctcccaaggctttatcaatggttacctgaccatggataccctgggcgcgctggtgttcggcattgtgatcgtcaacgcgatccgctcccgtggcgtcgagtcgcccaagctgatcacccgctacgcgatcattgcggggctgattgccggtgtgggcctggcgctggtgtacgtcagcctgttccgcctgggttcgggcagccatgccgtggccgcgggtgccagcaatggcgcggcggtgctgcacgcctacgtgcaatacacgtttggctccctgggcagtggcttcctcgccgtgctgatctccctggcgtgcctggtgactgccgtaggcctgacctgtgcctgcgccgagtacttcagcaagatcctgccgctgtcctacaagaccctggtggtgatcctggcgctgttctcgctgtttgtgtccaacctgggcctgactaaactgatcgccttctcgatcccggtgctgaccgcgatctaccctccgtgcatcgtgttggtggccctgagcttctgcaaagggttctggcaggaacagggccgtattgtcggcccggtgatgctggtgtcgttcatctttggctgcatcgacgcactcaagggcgcgggcctggcgggttggatgcctacgcaactggtaaacctgccgttgagcgaacaaggcttggcgtggctggtgccgtcggtgatgacgctggtcgtggccgtggtgattgaccgtatgctgggcaagcgcagcgaagctatcgcgtaacacgcggttcgtgctgtgctgaaatgccccgtatcaaacgatacggggcattttttttgagtcgatggcagtgtcttttttttggggatggcgtcaaaaatctcaagttgaaaacactggtcggtgtgggagctggcttgcctgcgatggcggcacatcggttgcgcgcggtggtgactgcaaagacgctatcgcaggcaagccagctcccacatttggaccgtgtcggccctatcatcctgtgtacaaggacccgcatgtcgttcgttgaagccaattggatccacctgcttgccgcgctctggtttgtcatctgctggggcggctacacccgttacgcaacgtggaaagcccgggacacggcgtgcctggccagcgtgttgcacctgtaccgtgaagactggatgcgccgcatgctgctgcgcgacaaccgtatcgccgacgccagtgtgatcggtaacctggagcgcaatgcctccttcttcgcctccagcactttgatcatcctcgccggtattctcacggtgctgggggcttcggagcgcgcagtgtcattgctggcggacattcccatggtgcagcaggcatcccagggtatgtcggagatcaaattgctgtgcctggcattggtgttcgtctacgccttttttaccttcagctggtgcatgcgccagtacaacttcgcggcggtactggtgggctcggcgcctatgatcggtgaacggcacgtgtcggagcaggagcgcaaggcgtttgctttgcgggcggcgcgagtgatttcgatggcggccaaccagttcaactttggcctgcgcgcctattacttcggcatgaccatgctggcctggtttgtcagcccctggttgttcatgttgatgagtagcggggtggtgctggtgctgtaccgccgcgagttccattccgatgtattgcaggtgatggtgtataccccgaccgatatgccagcagtcgaggctgcaaaagagggtgcatcgtagcgctggcagtaaatcgcagacaaagaaaagcccgcttagtcagcgggctttctttttgctgcaatacagctttaaacccagcgattactgcttggcaggttctgctggtgcggcaggtgcagcttcttttgcagcagcttcgttcgattcggcttgagctttggcagcttcggcgttttctttcgcagcgtcgttcactttatcctgtgctttagccatatcttgctgagcttgctcagaatgtgcagcagcgtcttgggctttgtcttcggatttcttgtcgcaggcagccagaccgagagcagcggccagcatcatggaaatagctaatgtcttacgcatggggtgtttctccttattgaagatatctactggcctttcgaacccaaggggccagcattagttccttatgtcccacagatatatagcatgtttcgtacaggaactttacccagccattcccatccgccgaattcacactaataagagtctaaaaacaatgaccgaaaacccgttgttagagcgtgccacgcgctttgtttcggccctgcgccattgccaggtgctgggggtgagtgttcatcaagccagcgaggagggcatgaccctcgtactgccgtatgggccgcatatcgtcggtgaccccctgagcggggtgatccatggcggcgcgctcacctcgttgatggacaccgcctgtggcatggcgaccttgtgcgtactgcccgagttcgaagtgtgccccaccctggacctgcgcatcgactacatgcatcccgccgaaccccataagccggtgtatggcttcgcgcaatgctaccgggtgaccaccgatgtgatcttcacccgtggcgtcgcctatcaggatgacccgcaacaacctattgcccatgtggtgggcacgttcatgcgcatgggcaagcgcctcaaaggcacccaaggcttgggcacggtcatcaagggagagcaggcatgacgcatcggttcaagacccgtctggagcaagcccacgatcgtggcaactatgacgcgctgctcgagttggtgccctatgccaggctgatcggcatcgaatgcacccgtctgggggatgagttgctgtttcgcctgccggccaacaaggacaatattggtaaccccatattgccagcgttgcatggcggggtgatcgccggcttcatggagttggcagccgccctgcatctgatggtgtttacgggcgctccgggcctgccgaaaatcatcgacttctccctggattacctgcgcgccggccagtttcgtgacacctatgccaagtgccaggtatggcgccagggccggcgcgtggccaacgttgcgattaccgcctggcagagcactgcggccgaaccgattgccaccgcccgggcacatttcaagattgaggaattggcccgcccttgaaatcctggcctgagcccccaactttgatgacaacccgccgccaaccctttcgggcgcggccactgccatccaattggagtttgatgaccatgagtgtggaaactcaaaaggaaaccctgggcttccagaccgaggtgaagcaactgctgcacctcatgatccattcgctgtattccaacaaggaaattttccttcgcgaattgatctcgaacgcctctgacgctgtcgacaaattacgtttcgaagccctgtccaagcctgagttgctggaaggcggcgcggaactgaagatccgtgtgagctacgacaaagacgccaaaaccgtcaccctcgaagacaacggtatcggcatgagccgtgacgatgcgatcacccacctggggaccatcgccaaatccggcactgcagatttcatgaagaacctgtcgggcgaccagaaaaaagactctcacctgatcggccaattcggcgtgggcttctattcggccttcatcgtcgccgacaaggttgaagtcttcagccgccgcgccggcctcgacgccagcgaaggcgtgcactgggcctccaagggcgaaggcgaattcgaaatcgccacgatcgacaaggctgaccgcggcacgcgcatcgtgctgcacctgaaagccggtgaagacgaattcgccgatggctggcgcctgcgcaacatcatcaagaagtactccgaccacatcgcgttgccgatcgagttgcccaaggaacagaccgttgccgaaggcgaagaagccccggcggcggagtgggaaaccgtcaaccgcgccagcgccctgtggacccgtccgcgtaccgagatcaaggacgaggaataccaggagttctacaagcacatcgggcacgattacgagaacccgctgagctggagccacaacaaggttgaaggcaagctcgaatacagctcgctgctctacgtcccggcccgtgctccgttcgacctgtaccagcgtgaagcgccaaaaggcctgaagctctacgtacagcgcgtgttcgtgatggaccaggcggaatccttcctgccgctgtacctgcgctttatcaaaggtgtggtcgactccaacgacctgtcgctgaacgtgtcgcgggaaatactgcagaaagacccgattatcgactccatgaagtcggcgctgaccaagcgcgtgctcgacatgctggaaaagctggcgaagaacgagcctgagcaatacaagagcttctggaaaaacttcggccaggtcatgaaagaaggcccggcagaagattttgccaacaaggaaaagattgccggtttgctgcgttttgcctcgactcaaggcgaagatggcgagcaggttgtgtccctggctgattacctggcacgtgccaaggaaggtcaggacaagatctactacctgaccggcgaaacctacgctcaggtcaagaacagcccgcacctggaagtgttccgcaagaaaggcatcgaagtgctgctgctgaccgaccgtatcgatgagtggctgatgagctacctcaccgagttcgacggcaaaaccttcgtcgacgtggcccgtggtgacctagacctgggtaacctggactccgaagaagagaagaaagaagccgaagaagtcgccaagtctaaagagggcctggttgagcgcatcaaggcttccctgggcgaagcggtgagtgaagtgcgggtttcccaccgcctgaccgactctcctgcgatcctggccatcggcgagcaggacctgggcatgcagatgcgccagatcctggaagccagcggccagaaagtgccggattccaagccgatcttcgaattcaacccgtctcacccgctgatcgagaaactcgatggcgagcagagcgaagagcggtttggtgacctgtcgcacatcctcttcgaccaggccgccctggcagccggcgacagcttgaaggacccggccgcgtatgtgcgccgactgaacaagctgttggttgaattgtcggtttaacaccgttgtagaaaaacccgcttcggcgggttttttcgttctggctctactgtaggagcgagcttgctcgcgaaaaacgtgagatcaccgcgttcattcagcatttgcgcgttatcgttgacgttcttcgcgagcaagctcgctcctacagggagcatcgtcaatccatctgaattggggaaaatgatgagccaagtcactgtacgttccgtggtctatcagattgatggccagtcttatgaaagccgtctggcgttcgatgccagccacaaaggcccgcttccgggcttgctgatggcgccgaactggatgggcgtgagtgcgggggccgaagagatcgccaaggccgttgccggcaaaggctacgtggtgttgattgccgacctctacgggcaaaacgtacgtccttcaaatggcgatgaagcgggcgcggcgatgatgccgttgaagaatgatcgcccgttgctgaacaagcgcatgcaagcagcgttagagcaactgcaaggccagactgaggcagcagtggacacctcgaaactggccaccttcggcttctgctttggcggttgctgctccctggagctggcccgtaccggcgcgccgctgaaggctgccgtgtcgttccatggcaccctggatacaccgaacccggcggatgcgaagaacatcaaggggtcagtgctggtgctgcatggcgcctcggacccgttggtgcccaaagagcaactgccggcgttcgaagatgaaatgaacgcggcgggtgtggattggcagttgctgagctacggcggtgcggtgcattcgttcaccgacccccatgccaatgtgccaggcaagatgatgtacgacgccaagaccgctgcgcgggctttccagtcgatgcataacttgttggatgaagtgttcaagggctgatttctcagcgcctgatcggacgccatcgcaggcaagccagctcctacattctaaaatgtgtatacccatcaaatgtgggagctggcttgcctgcgatagctatttcacaggcaactcgattctttctgactcccccggcacggtgggccaatccccggccgcccaacgctgtctcgcctgctcgatcaccgccggatcactcgccacaaaattccagttgatccgccgtggcccatccagcggcgccccgccaaataccatcaggtggcaatcactctcggcatacagggtcatctcctgcccagtcggcaataccaccaagctgttgacctccagggcttcaccgtccaactgcacctcaccctccagcacatacaccgcacgttcctcatgttcatcaggaatcaacagggtggtggcggtttgcatctgtacctcggcatacagcgtcggcgacagtaccggcaccggtgacctgaggcaaaaaccatcaccggcgatcaaacgcacctgcacgccgaggttatcgcttttcggcaagctcgccgctgggtgatggctgtagtgtcccggcccggtctcgtggtccttgggcgaggccagccatacctgcaggccatgcaggctgaaacccctggccttgaccgcttccggtgtgcgctcgacgtgggcaatcgcactgccggcggtcatccagctgacatcgccggcttgcaccacctggtccgagccgaggctgtccttatgctgcaaggcgccttcaaacaggtaggtgagggtggacaggccgatgtgcggatgctggcggatattcatgccggtacccggcgcgtagcgggtcgccagcatatggtcgaaaaacacaaagggcccgacgctgcggcattcacgcgagggcagggggcgcaggatgggctggccttctacatcttcggggcgagggcggatcacggtgagggtggtcatgggcatcccagtctgagcgggttggatgcaaccaagcataacccgctcgatgggaagttggggctattggctgaaggcgccttccgacagtttcgtttcgatggtgacttcggcagtggtcatcagcttgtgtaccgggcacttatcggcgacgcggtgcagttcattgcgctgggcatcggtgagtacgcccttgagggtcagcttgacgttgagcttgtatttacccttctgctcctcggtgctgtcatgggtgacctccacggtcacgccggtcagcgggatatcttttttctgcgcgtagagccttacggtcaaggctttgcacgacgccagcgcagcatcgaaataatcgtggggggagggggccgaatcgtcaccgcccaggctcttgggcaggtcggtaaacagctcgtgattattgatattcacgctgtgacggaagttttcagcgttcagcgtattaacggtaacaggcatggcaaacctcgtaaggggcaggatgaaggtcatgcagttatagagcatgctggcactccagtgttccggttttttccgtgctgaaccctgaaggttggcgcaaggtctacccgtatcaacccttattgaggttttaccgtgtctggagcccgcctgagtcttgccttgttgctcgccgccagcagccttgccgcgcaggcccgtgactatgcctacagcgacgcgcacctgcattacgtggatttttttcaggaaaccgccggcatggacaagctgctcaaggccatggcggacaaccgcgtagagcacgtcatgatttccgggatccccgtggccaagaaatggcacgaagacgaacccaagcgcccgcgctactacgccggtgacgacgccgatgcctattggtacagcgccacggatgtgatcgtcgcggcggcggtcaataaacttacccccgagcaacgccagcactttcatccgttcctggccggtttcaatcccaacgacaagaactctgcggcccatatccagcgcatgctcgacctcaacccagggctgtggcagggcattggggaagtgttcacccgtcatgatgaccttaccgccctgacctccggcgacacgccgcgtgccaataacgaagccatgacgcgcatctaccacctggcggccgaaaacgacctgccggtgatgctgcactccaacatcacctccaagcgtgagcgcaacccgctgtacctggcggaagtcgagcagccgttacgcaaccacccgcacacgcgttttatctgggcccatgccggtaccagcaaggaaatccaccgtcatcaggtgcaaatggattttttgctgcccaccttgaatcgtctgcttgaggcgtaccccaacctgtatatcgacttgtcctggagcatgctcacgccgtatctgctggatgaggcgggtaaacctcggcctgagtgggtaaagctggtggagcgcttcccggatcgtttcatgctcggctccgacgtggtggggcgcttcaataagttgggcaaagagatgcgccgtttcgatcctttcctcgatgcgttgcccgaagacgttgcccacaaggtcgcgcgcgacaatttcctggccatcctgcccaagccgcctcgcgatggcgacgcgcgttgatatcgcgttttggtcttatgccaatgacctgaggtgccgataacgtccaagagacccgctgcaggtggatgcagtacttttggaaggaaccctggcatgaatatccgcagtttgaatatcgcccctcgcgccggcctgggctttggtgtgctggcgttgatggtgttcgtcttgggcggctttgccctgttgcagatggccaacatgcgccagcagtcggaccaggtggagaccaactggctgcccagcgtgatggcggtaggggagatgaaccaggatgtgttgcgtattcgggcgctgacgttgcgcttgctggtcaaccgcgacccccaggcggtggcgcagaacgagcagaaaatcgccgagatcaaaaccggtttgcaccacgcggaaggcgtgtacgaggcgttgatcgtcttgcctgaagagcgcgtgctgtttgatcgcttcaaggtcgaggagcagcagtacctgcaacgccaggagcaggtggtgggcctatccaaggccaatcggctggaggaggccattgcggtggtcaatggcgaaatgaatcagatggccgaccaaatggccgtcaccctgcgtgagctggtcaatctgaacaagtccagcgccaacgaggccgcccggctggcacagcacgtgttcagccaatcgcgggtctgggtgatgggcatgattggcgtcacggcgttgatcacgatcggcctggccgtgtggctgacgcgtagcatcgtgctaccactggcgcagtcgttgaaagtagcccaaggcgttgccagtggcgacttgacgggcgagatcaggctcagtggcagcgacgagccggcgcgcttgcagcaggcgctcaaaagtatgcaggagagcttgcgcgacactatccggcgcatatcagagtcatcgaaccaattggcgtcggcttccgaagaactcagttgcgttaccgaggatgcgacccgcggtttgcaccagcagaaccaggaaatcgaacaggcggccacggcggtcaatcagatgacggtggcggtggaggaggtggcgagcaatgccgtggccacttcccaggcgtctcgcgaatccgaccgcattgcccagcaagggcgtgaacaggtgcagcagacggtggtgtcgattgaagccctcgcgaccgatgtgaccgccaatgtgacccaggtcgaagcgctggcgcaaaaggtctatggcatcagcacagtgctggatgtgattcgctcgattgccgaacaaaccaacttgctggcgctgaacgcggcgattgaagcggcgcgagcgggagatgccgggcgcgggtttgcggtggtggccgatgaggtgcgggccttggcccatcgcacgcaacagtcgacccaggaaatcgaacagatgatcagcggcattcagcagggcactgacctggccgtcagttcgatgcaacagagcaacacgcgggcgcggtccacgttggacatcgccaaatcggcgggcatggccctggaagagattgcctcggcattcaccttgatcaacgaacgcaacctggtgattgccagtgcctcggaggagcaggcggcggtggcgcgggaggtggatcgtaacctgatgaatatccgcgacctggcacatcagacctctaccggcgctaatcagaccagcgcagcgagccaggagttgtcgcggttggcggtggatctgaattcgatggtggcgcggttttcggtgtagggcggggaaccgggttggcccattcgcaggcaagccagctcccacatttgactgtattcacaattcaaaggtgggagctggcttgcctgcgatgaaggcgacgcggtttcaaatcaaagcacaaaaaaagccccgaaccagtcggggctttttcatgtgatcaacctgcggggcttacttgccctgccagcgcttcagtaccagggtggcattggtgccaccgaagccaaagctgttgctcatcacggtgtcgatcttggcgttttcaacggtcttggtcaggatcggcatatcggccacaaccggatcaatttcgtcgatgttggccgagccggccatgaagttgccttccatcatcagcaggcagtagatcgcttcgtgaacgccagcggcgcccagggagtgacccgacaggctcttggtggagctgatcttcggagccttgtcgccgaataccgcacgcacgccttccatttccttggcatcgccgaccggggtcgaggtgccgtgggtgttgaggtagtcgattggggtgtcgacggtggacattgccatctgcatgcagcggatggcgccttcaccgcttggcgcaaccatgtcgtagccgtcggacgtcgcgccgtagccaacgatttccgcgtagatcttggcgccacgggccagggcgtgttccagctcctcgaccaccaccatgccgccaccgccggcgatgacgaaaccgtcacgcttggcgtcgtaagcgcgggaagctttttctggggtttcgttgtactgggtggacaatgcacccatggcgtcgaacaggaacgactggctccaatgctcttcttcaccgccgccggcgaatacgatgtcctgcttgcccagttggatctgctcaacggcagtcccgatgcagtgggcgctggtggcgcacgcggaggagatcgagtagttcacgcccttgatctggaagggcgtggccaggcaggcggaaacggtgctgcccatggtccgcgtgacacggtacgggccgacgcgcttcacgcctttttcgcgcaggatgtccagcgcttccatctggttgagggtcgatgcgccgccggagccggcgatcaggccggtgcgtacgttcgaaacctggtcttcgctcaagccggagtccgcgatcgcgtctttcatggccaggtaggcgtaggcggcagcgtggccgacgaagcgatagatcttgcgatcgatcagttcttcgaggggcaggtcaatggagccggaaacctggctacgcagacccatttcggcatattccgggttgaagcggatgccagggcgacttgcacgcaggttagcggtgacggtctctttgtcattgcccaggcaagaaacgatgcccagaccagtgataacgacgcggcgcatgcggataacccttaaaagttgtcagtggaagtgaatacgccgacccgaaggccttcggcagtatagatctcgcgaccgtcgacagtcaccgaaccgtcggcgatggccaggttcagcttgcccttgaggacgcgcttgatttgaatgttgtaggtgactttcttggcgctcggcagtacctggccaaagaacttcacttcgcccgaacccagggcgcgaccgcggcccggcaggccttgccagcccaggtagaaaccgaccagctgccacatggcatcaaggcccaggcagcctggcatcacagggtcgccttcgaagtggcacgcgaagaaccacaggtcaggggtgatatccagctcggcgaccaattcacctttgccgtacttgccaccctcttcgctgatatgggtgatgcgatccaccatcagcatgttcggggcgggcagttgcgcgttacctgggccgaacagctcaccgcgactgcagcgcagcaggtcttcccgagtaaaggcgttttgtttggtcatgcgagctcctcaataatcccatgcggcagggtagggcaaatcttcccgaaccgaatgaagcgttcatgcctcatagcggcagcctacacatagactattgcgttgtagtgaaagtcacagcggcaaggcactgaatgtacacttgttcactgaaattttaaaccgggcctgtttatcggcccgttcgggtgcctaagactgccgcactttcgtctttcacgccagtcgcagttggctgatggcgcggcgctactgtacccagcgctgtaggatttgctgcaaatccgtgcgtttgaacggcttggccaggtaatcgttcattccggctgccaggcaggcttcgcggtcgccctgcaaggcgttggccgtcagggcgatgatcggtagatcggcgcagccgggcagttggcgaatctgccgcgtggcttcgtagccatcgatcaagggcaggcggcaatccatcaggatggcggtgaaaatcaggctctcggcgctgcggatcgcctcggcgccgtccgtggccaggctgacttcatagcccaggctgcgcagcatcgcttcgaccacggtgcggttgaccgggttgtcttccaccagcagcacgtggcgcccgtcgccggcgctggctttgccgagtgcgtcaggagcggccaccggcacatgctgctggtcgatggccagcggaatttctagggtgaacaccgagcctcgatcctcttcgctctgggcgcgcaaggtacctcccatgcgctcggccagggtgcgcgcaatcggcaggcccaggcctgttccaccgtaacgcctggaaatcgaactgtcggcttgctggaatgcatcgaacatcaattccaggcgttcagcggaaatgccaatgccgctgtcgcgcacggtgcaggtgaaccacaccaactcatggtccagggtttgccagtggggctcgacggtcacgctgcctcgttcggtaaatttcagtgcgttgccgatcaggttcaccaggatctggcggatccgtgtcgggtcgccgcgcacccgcagggcttccaggcccatggggatgggcaactccaggctcagcccgcgctgctgggcactgtgctggaacgcctgggcgcagctgttgataaggtcggcgaggttgaacggaatatgttccagttccagtgcggcgcgttcaatgcgtgagaagtcgaggatgtcattgatcaccttgagcaagtgctcggtagactccgaagccagcgccgcatactcggtctgctcctcggtcatctcggtggtttccagcagttgcagcatgcccagcacgccattcatgggcgtgcgcagttcatggctcatcatcgccaggaaatccgacttggcattgttcgcccgttcggcttcttcacgggtctggatcaactgggccatggcttgttgctgttcgcgactggcctggtgaaggccctcggccaggttgttgatatgccgcgagaggtcgcccagttccgagtcatcgacgatgggcagtggcgtcttgtaatcgccttgctggatggccttgaccgcatgccccatggcgctgatcggctttgacaggctcgccgacaagcgccgcgccagcaggaaggtaaacagcagggcgaacaacgccaggatcccggccttgaacaggatctcctgctggcgctggctgaacgcatcattggacatgcccacgatcacccgccccaggtagtccgcgcggggggccttgggttcgttgaggttgtcctggaaaaagtcattgttgagctggatgtgttgcaggcggatcggtgcctggaacactttcactgacagcgagcgatcatgtcgctcggacggctgctccacgtacaccaggatgttctcggcgctgtcctggatctcaaggaagcgtacatggggcgtggccagggttgcacgcagcagggattcaagcacgtcattgttgccggaaatcacgccgtactcagtggcgggcgccagctggttggcgatcaattgaccggtgtggtccagttcctggcgcaaatcctggatgcgcacgaaggtgaagaaggtgatgagcagcagggtcaacagcagcgcagggcccagggtaatgagctgggtgcgggtgttgatatcccaacgacgacgcaaggtcatgggcgttgttctccttcggccaagcgggcggcaacggcgacttcatcgacctgttcgatgcccagtgagcgcgccacttgcgggttgcctacgactttgaagtgttgcgggtagagcgtgtgcggccaattggccggcggctggtccagcaggtggcccagcacggcgagccagtcggcctgatcgctgtaggtgctggccaggctgccggcccgcacaaacccggcattgggccccaccaacggcagttgttgggcgtaactgctcagcaacaggttttttacagtcttggggttgtacaggttcgggtcgtccaggcccagtaacacgtcgctgttcttgaacaggttttgcagcgggcggctgtcactggtgttgtcccagagctggggcacgatttgcaggccgatgggcttggcggcctgcatcagttcgcgcagcaggaactcactgccggcatcgtaaagcacgccaacgcgctgggcctggggcaggatatgggcgatcaggcgcaactgacgctccagcggcgggtcgctccagagcaggctgattttcgccgggtgcgtgctgcccaggcgttgccgggcctggaggcggctgatgcgcagcaccagagtgggcggcccctgggcatcctgcaggcgccagtcgaggccgggcaggtcgaggaggatcaaacgggtgctggcaggcaagtccctgggcgccggcaactcgttgaggggggtaaagctgacctggtcgttggggcgctgttgggcaagggcctgggtaaaggcgcgcacaccggcaccgtcctcggcggccgtgagcaggatgctggcactccaggccggcgctgccagcagcaggcacgccagcagcaggccgcgacgccacaatcgtgaaagcaggaagcgtgtcatccgtgactgatcggccatgtcagaagtccagctcggcgctgaagtagagaacgtggcgatggtcgtagttgttgtccgcccaggtggtgggctggttgtccaggcgttgttgcaacatgcccgccagctccacattggttttgcctacggcgatgcgtttggccacccgcaggtcgacccgctggaagcgatattggttgagtgcgtcgtcgccatagtagaacaaggcgctggaccacccctggccccattcacgcagccaaccggccgagccgctgttacgcgcggtttgcgccttgtcccgcgggttgctggaggtggcgtctacataagcataggtcaggcgcaggcggtcggcgttactcacacgccagtcgaactgtgactcggcaccggtgaagcgcgagctgttggcgttactggcgatgtactggttgttgcgcagcggcgagctgatcatgtcggtgatttcgtcatagaacagcttcacgtcgacattcagccccagctcggcaaagaagccgttgtagcccagctcgcgtgagcgcatcaactctttgtcgaggttgccggggccgcgcgtcacgacaaaatattgcccggcgttttgcccgtaggtcggggagctgagattggtgacacggtagctccagttgacgttgttctcgaacatgtccggcgagcggatcgcctcggagtaaaccgcgcgcaagccgtggcgggggttgatcaggtaattgaccgccacacgtggggtcagcgagttgccgctcaggtgggtgtcttcgtacatggcgccaccttgtagcagccagtgctcgctggcgcgccattccaagtgcccgaacaggcgccaggtggtgtcgtccagggtgccattgaagtaggtctcggaatcggcgcggtcgtagcggtaattcacgccgctgaccaggcgcaggctgtcggagaggctgagcgtgtcctggatctccaggtcgtagcggctttcacgggtgctctggtcgatatcgccgcatacgctctggttggcgccgttgcgccactggtccagcacctggttggccaaggcctgttcggcggcgttacctggtggggcggagccttggctgtaagtgtccatgtgccgcgccagcaattcggcatagttggggttgagctgccatagctgggtcaattcagggctgaacgagaccttggcgtcacaggctttccagatttgcttgcggtcccattgctgtgccgagccctggatatacaggctgtgatcggggttgaagtcaaagttccagcgcagggagcccgcgtagtctttggcggtgacgtcggaattgctgccgccttcggtaatcccggcaaacactggggtgtaggtgtatgggcgttggttggtgccttccttgacgttcagttgccagtcgaggctttgttgcgcgttcaaggtctggctcaccgccaggctgaaacggttgagacgacgcccgtcacggcggtcggcgccggccgcgtcgctgtcaaaaccatcgtcctgttgcccggacagggacaagcgcaaatcgccggtctcccagcccacaccctggctggcatagaagtcattgatgccacgctcgccacggatgacctttacccgcgagccgtggctgttggccggcgagcgggtgagaatattcaccaccgccatcagcgcattggcaccgtagctgaccgtgttggggccgcgaaacacctcgatgcgctcgatatcccccatggccaccgggatatcgctccaatccaccgtggccaggccggcgcggtagaccgagcgcccatcgatcagcacctgcatgcgccgtgcatcgctggcgctggtgccgtggtaattcactgaggcctggttaccgctggtgtagccgaccatcatccccgggaccagccgcagcagttccgaaatgtcccgggcgccgctggccttgatcagctcactgtcgatcaccgtcatgctgccgggcacggcggcggccgattgcttgaggcgcgtggcggtcaagacctgcggcagcggctggctgtcgaggaatagatcgtcggcttgcgcgcaggtagcgcacgccagcatcaataacagtgatgagcgaggaggggggcctagatacacggcacggccttgttaattgcggatagccgcccatgttaaccgaggcgcggctatttgccagtcgtaggacttgcaattacttcgcacctccatggcattttccgacaaccccgcgaattgatacgggggctggccgcaagccgggcgccccgtataatgccgccatcgccactggtatggattaacggattgcatatgactgaacagcgccctattgcggtcctgggaggcggaagttttggtaccgccgtggctaacctgctggccgagaacggccacgcggtgcgccagtggatgcgcgaccccgagcaggccgaagccattcgcgtgcatcgcgaaaacccccgttaccttaaaggtatcaagattcatcctgccgtcgagccggtgaccgacctgctggaaaccctcacggcctgcgacctgtgcttcgtcgcgctgccttccagcgccttgcgctcggtattggcgccccacgccgaacgcctggccggcaaactgctggtcagcctgaccaagggcatcgaggcccacaccttcaagttgatgagtgaaatcctcaccgaaatcgcccctcaggcgcgcattggcgtgctgtccgggccgaacctggcgcgggaagttgccgagcacgcattgaccgccaccgtggtcgccagtgaagacgaagccttgtgcgagcgcgtccaggcggtgctgcatggccgtaccttccgggtctacgccagcggcgatcgcttcggcgtcgaattgggcggggcgttgaaaaacgtctacgcgatcattgccggcatggccgtggccctgggcatgggcgaaaacaccaagagcatgctgatcacccgggctctggccgaaatgacgcgttttgcggtgaaccagggggccaaccccatgaccttcctcggcctggcgggcgtgggtgacttgatcgtcacctgctcatcgcctaaaagccgcaactatcaggtcgggtttgccttgggccaagggctgagcctggacgaggcggtgacccgtctgggcgaagtggccgaaggggtcaacaccctcaaggtcttgaaggccaaggcccaggaagtgggcgtatatatgccgctggtcgccgggctgcacgcgatcctgttcgaagggcgcaccttgaaccaggtcatcgagttgctgatgcgggccgagcccaagaccgatgtcgactttatttccaccagtggtttcaactgaggaacgcgtcatgaacgatcccaaagctgcccctccttacgagtcgattgtcttgcgcatcctgtggatgctggtgtttgcgctggtatggcaggtggcgcaattcctgctcggcgcgctggtggtggtccaattgatttaccggctgatttacggcgcacccaacctgggccttatgagttttggcgacagcctcagccagttcctggcgcagatcggccgctttggcagctttcacaccgaacaaaagccctggccgtttgccgattggccaaccccgcgtgcgcccgaaggtgaagcggcccacagcgtaccgccggcaccgcacccggtgcgtgatgaagagccgaagctatgaaggtatggattctgcgtcacggtgaggcccaagcgcatgcgcgcacggacgccgagcgcaaccttaccgagcatgggcgtgccgaagtcttgcgcagtgctgcgcacctgattggccagcccttgggcgccattattgccagcccttatgtacgggcgcagcagacggcgcagctggtgcgcgatgtgctggggtttcagcccgaaatccgtactgtgccgtggctgacgcccgatggggatgttcagcgagtgctggagaaactcgacagcgatgacgacgtgctgttggtcagccaccaaccgctggtgggcagcctgatcagttttttgcagcatgggcatcagcgtcagccacagccgatgtacacggccagcctggcggagcttgagggtgattttccgttggcggggttgatgagtctggtgggtgtgaagaatccctaggcatcgtgcgacgctgtggcgagggcgcttgctcccgcgacggcctgccgccgacgcctatctcgctgacaccccgcgatccaactgtgggagctggcttgcctgcgatgacgacctgacaggcgacactgttataccgagtacatatccattcctgcggtaacggccacttagagttccgccctgacttttggaaaaggacccggaattccggccagcgtggttcgacagggcgcctgagatcaagatcaagagcagatcaagagcggctcgcttcgcatcgtggttagcgacaagccatttcctttacctgtgctataccgtcaaccaagcaagtgcttggtcggctgtatctcggatcacaaaggagcgcgtcccatgcctgtcgcttttcgtttgccgttgcaggtcttcttcgagcgtgaagcgcggcacccgcgcaaagtcttcctcgttcagcccatcggcggcggtgaggtgcaggccctcacctggggcgaggtcggccaccaggctcgttgcgccgcgcactggctgcgcgcgcgggagttgccccagggctcgcacattgcgctgatttcaaaaaattgcgcccactggatcatcgccgacctggcgatctggatggccgggcatgtgtcggtgccgctttatcccaacctcaccgctgagtccgtcgcccatgtgctgacccactcgcaggcgcgattggcgttgatcggtaaactcgatgactggccggcgatggcgcctggcgttcctgagggggtgccgactatcagcctgccgctatgtccggaggagactttcgatttctgttgggcggacctgcaagcctgttcaccgatccaggacaacccgctaccggatgccgacagcctggctactattatctacacctccggtactactggcctgcctaaaggggtgatgcacagtttcggcgccttggggtttgctgccacgcgcggtactgagttgttcggcctgggggagggtgaccggttgctgtcgtacctgccgctgtgccatgtggcggagcgaatgtttgtggaaatggcgtcgatctataccgggcaaaccgttttttttgctgagagcctggagaccttcctgaccgatttgcgcagggcgcggccgacggccttgtttggcgtgccgcgcatctggaccaaattccaactgggcgtctacgccaaaatcccggaaaaaaggctcgatatgctgttaagcctgccttttatcggcaagcgcgtcggccataaagtcctcgccggcctggggctggatgcgttgcgcatcgccctgtccggcgcggcgccggtgcccgaggcgttgctgcgttggtatcagcgcctgggcctggatgtgctggaggtgtatggcatgaccgaaaactgcggctattcccatgtgtgtcgccctggtgggcaaaggctcggttggatcggccagtcctgcccaggtgtgcaagtgcgcatcgacccgtcaggcgaagtgcaggtacacagtggcgcgaccatgctgggctatttcaaggacccgcagaaaaccgcggatacgctcaccgcagatggcttcctgcgcacgggtgacaagggcgagcaggacgctgacggtcgtctgcgcctgaccgggcgcctcaaggagatcttcaagaccagcaaaggcaaatacgtggccccggcgccgattgaaaaccgcctggccgaacatgcgcgtattgaacaggtgtgtgtggtcggcgaggggctcagcgcaccgatcgggctgtgcgtgttgtcggcgccgggcgaggaccgccacgccctgggcagtggccttcagcgttggctggcacaggtgaatgccggcctggataagcatgagcgcatggggcaactggtggtggtgaaagatcactgggcagtggaaaacggttttctcacgccgaccttgaagatcaagcgcaacgtgatcgagtcgacgtacgggccacaattacaagcgtggagcgcgcgcgccgaaaccgttctgtggcaggattagggccgtaataaaaccaacaaggacaaccgtatgagcctgtggcgtacccaaccgaatatcgaacacctcaacgcgatccagaaaaacaccatcggtgaaatgctggatattcgtttcgaaagcttcgacgacgaatcccttaccgccagtatggtggtcgaccaccgcacccatcagccctacggcctgctgcacggcggcgcctcggtggtgctggccgaaagtgtcggctccatggccgcctatttgtgcattgatgcaagcaagttctattgcgtgggcctggaggtcaacgccaaccatctgcgcggtgtgcgcagcggtcgggtgacggcggtggccaaggctatccatatcgggcgcactacccaggtgtgggatatccgcttgagcagcgacgagggcaaggccagttgtgtctcacgcttgaccatggccgtggtgccgctgggtgaacaaccgccggcgcgataggcgtggcgtgagtgtcatcattcctggcagttacagtcattgctgtaggggccgggcatggtgacaatccccctctgtttttgttgatggaacctgtatgccgcagcatgtgttttttacccacgccaatggtttcccttcggccacctacggcaagctttttgccgccctggccccggaatatacggtggcgcatctgccgcagcacggccacgaccccaggttcccggtggatgataactggcagaacctggtggacgagctgatccaccatctggagcagcagccagagccggtatggggcgtgggccattccctgggcggcgtgctgcatttgcacgcggccatgcgttgcccgcacctgtaccggggcgtggtgatgttggattcgccggtgctcacccgcgcagaccgctgggtgatccgcgctgccaagcgctttggctttatcgaccgcctcaccccagccgggcgcacgcttggccggcgcgaagaattcaccgacctggacaccgcgcgcagctacttcgccggcaagaccctgttccgtggcttcgaccccgattgctttgacgcgtacctgcaacatggcctgcagcaagtgggcgaccgcctgcgcctgcggttcgacccggccaccgaaatcagcatctatcgcggcgtgccccacaccagcccgggccaggtgcgccaactgaaggtgccgctggccgtggtgcgtggccgccagagccgggtggtgatgcgtcaccatgccagcggcgtcgaccgcttgcccatgggtgaaatgctcaccatgcccggcggccatatgttccccctcgaacgcccccaggacaccgctgccttgatcaagaacctgttcgcccgctggcaggcccgtgagcgcagttgcgcatgagcacgcctgtcgaagaggttcgcctgagcctgccgcatatcgaactggccgcgcatctgttcgggcctgaggacggcctgccggtgattgccctgcatggctggctggacaacgccaacagctttgcgcgcctggcgcccaagctgcacggcttgcgcatcgttgccctggacatggccgggcatgggcattcggcgcaccgcccggcaggcgccggttatgccttgtgggattacgtctacgacgtgctgcaggtggccgagcaactgggctggaaacgttttgcattactcggccactctcttggcgccatcgtctccctggtgttggccggggccttgccggagcgggtgacgcacctgggcctgatcgacggtgtgatcccgccgaccgccagcggcgagaacgcggccgagcgcctgggcatggccttgcaggcgcaattgagcctgcaagacaagcgcaagccggtctacaacagccttgatcgagcggttgaggcgcggatgaaaggcgtagtggcggtcagtcgtgaagcggcgcagctcctggcccagcgcggtttgatgccggtaccgggcggttacacctggcgcagcgatagccgcctgaccctggcgtcgccgatgcgcctgaccgacgaacaagccatggccttcgtgcgacgggtagggtgccctacgcagttggtggtcgcggctgacggcatgctggcgaaacatcccgaattgctttctcagctacccttcacggttaccacgctgccaggcggccatcatttacacctgaatgacgagcccggcgcggctcttgttgcagactgtttcaatcggttcttctccacgccttgacttggcggggtcaactgccgaggctgggcggattgaaagggagtcaaccatgaacacactcaatatcgctgtgaccaacattggccagggctcactgatccgatgagcctgggcaaaggatgtatccgtgcccttggcatttgctgtttcagccccctggtatttgccgccgacctgcccggcagccaggatttaccggcggtagcccgccaggttgatgcgcaaatcgtcgattaccgccccgctgaagacaaggaacgcatctaccccatgggcgcgattcgcaagatcagcggccagttgcgctacgaaggccaggccatcgcacgcggcccggccactgcaatcacctatgaactacccgccgaacacagctccagcgctgcctttactgcaacgcgcgaagccttgcaggccaagggcgcgcagttgttgttctggtgcaaggcccgcgattgtggcgaaagcagcctgtgggccaacgaggtgttcggcaacgccaagctggtgggcgccgacggccaacaggaatacctgctgctacgcctggccgccccgcaggacaattccctggtcgcgctgtacggcatcacccgtggtaaccgccgcgcctacctgcatgtggagcaactcgacgccagcgcgcccttgggcgacctgctgcccacctcggccaccctgctgcgtgaactcaaaagcaccggcgagctggattttcccgcgctgggcgccgaaccggatgacacctggctgaccctgatatcccgcgccttgaacctcgataccaccctgcgcgtcagcctgagcgggccaaaggccgagtcctggcgccaggcgctggttgagaagggcgtgcgcaccgcccgtctggaaaccggcagcggtgaaacccaaggactgcacctgcatctgatacgctaagcaccacagggcgaacggacccgcgccgttcgcctaagctctcttcctacagccttcttctcgagatacccgatgctcaataacgatcgcctgctggtgcaaatcctgctgctggtgctgtttggtgccagcttctgggtcatggcgccgttctggtcggcgctgttctggggcgcggtgctggcctttgccagttggccgctgatgcgtttgctcacccgctggctcggcggccgggaatccctggccgctggcatcctgacgttgggctggatgttgctggtggcggtgccattggtatggctggggttcaacctggctgaccatgtgcgtgatgcggtggcgctgatcaaggacatccaggtcgacggcttgcccgaggcgccgacatggttggggtcgataccctttgtcggcgagcgcctggtggcgacatgggacagcattgatcagcaaggcgcggcgctgatggtgagcatcaagccgtacctgggccaagtcggcaattggttgttggcgcgcagtgcgcaaattggcggcggtattcttgagctgaccctgagccttgtcttcgtgttctttttctaccgtgacgggccgcgcctggcgatgtttgtgcatcgcctgttggagcgcctgatcggcgaacgcgcgggctattacatcgaactggtggccggcacggtgcagcgagtggtcaatggtgtgatcggcaccgctgcggcccaggcgctgctggcgctgatcggctttctgatcgctggcgtaccgggcgcgctggtgctgggtatcgtgactttcctgctcagcctgattcccatgggaccgccgctggtgtggatcccggccacggcgtggctggcgtggaagggcgattacacctatgcggtattcctgggcgtgtggggcacgttcgtgatcagcggcgtggataacgtgctcaagccgtacctgatcagccgtggcggcaacttgccgttggttatcgtattgttgggcgtgtttggcgggttgatagcgttcggctttattggcctgtttatcggcccgacgttgttggcggtggcttacagcctgctgacagactggagcgcgagccaggcccaggtgcgccgcgaagacaaaccgtgtaactgatgggtgtaggtgcgacgccgtacctgtgggagctggctggcctgcgatagcgttgggccagccaacacctcatcgactgacactacgcaatcgcaggcaagccagctcccacatttggatcgcggcgcgtcaggcaggtgggagttctcaaaccctcggcaaccacatcaccgccgtcaaaccaccgcccggtgtctcctctaggctcaggtggccgccgagtcgctcgacggcttccctggcaatggtcatgcccaaaccaacccctccagaattgcggttgcgcgatccttccaggcgaaagaacggctcgaacaccgcttcgcgcttatcggcggcgattcccgggccgtggtcgatcacccgtatcaccagggcgccgcggctgtcggccagttctactcgggcggtgccggcatagcgcagggcgttgtcgatcaggttgttcaggcaggaacgcagggccatcggctgtacctgcaacggcgcacaggttccagaaaattgcacgtcgcggccttggtcctgggcgttttcactcaaagattccactaatgcctgcacatcgagccaatgccgtgtctcgctggtgcgctgttcgtgcaggtaactcaaggtggcatcgagcatgccgatcatgtcgtccaggtcctggcgcatctggccttgcagcttggggtcttcaatctgttccaggcgcagcttgaggcgcgagagcggggtgcgcaggtcgtgggagaccgcgccgagcatgcgggcgcgctggctgacctgttcgcggatgcgcttttgcatcaggttgaaggtggaggccgcctggcgtgcctcgcgagggccggactccaccaggggcgggctgtcgaggtcgacgctcaggcgctcggccgctgcgctcaggcgctggatcggccggctcagcagtttggcgccgtaccaggcggcgatgatcagcgagataaattgaaacgtcaggggcaccaccgggccgccgaaccaggggcgaggcgccttgcgcaagggcgtgaggctgccgtccggttgttcgacgaacgccgcgcggggcggtggcggcgggccgtagtggtgaaaccagaagaacgccagcacatgggccagcacaatcgccaccagcaacaggccgaacagtcgcccgaacagcgtgttgaagggggcgcgcatcaaccgatatcccgggcgtcgaacaggtagccttcgccgcgtacggtcttgatcagttgcggagccttggggtcatcccccagtttctgacgcaggcgcgacaccagcaagtcgatgctgcggtcgaaagcctcgatggaacgcccacgggccgcgtccagcagctgttcgcggctcagcacacgccgcgggcgttcgataaacacccacaacaaacgaaactcggcgttggacagcggcaccaccaggccgtcatcggccaccagctggcgcagtacgctgttcaggcgccaagtgtcgaaacggatattggcccgctgttcggtgcggtcatcacgcacccggcgcaggatggtctggatacgcgcgaccagttcccggggttcgaacggcttggacatatagtcgtctgcccccagttccaggccgatgatgcggtcggtgggttcgcagcgggcggtgagcatcaggatcggaatgtccgattcggcgcgcagccagcggcacaatgtcagcccgtcttcgcccggcagcatcaggtcgagcaccaccacatcgaaggtctccgcttgcatggcctggcgcatggcgatgccgtcggtgacgcctgaggcgagaatattgaagcgtgccaggtagtcgatcagcagttcgcggatcggcacgtcgtcgtcgacaatcagcgcgcgggtgttccagcgcttgtcttcggcgatcaccgcgtcttttggcgcttcgtttacagggtcgcaaggggtatgcatagcgaggtcatctgcctggttgtggctgtcagcataggcgcccagttccagggctggaagtgctgggcgggcggtcatgtgcgcgaggctagccgggcggcgtattgggggcgtgtcgtgaatgtatcgggcttgaaacaattgccttgaatcgccggtattgggcgcttgatcggtatttaccgatcatcggatcccgcaacggcgctgcttgcgctacaatccgcgccgatttcgacttgcctgagagcccattccaatgtccgtctgccagactcctatcatcgtcgccctggattaccccacccgtgacgccgcactgaagctggctgaccagttggaccccaagctttgccgggtcaaggtcggcaaggaattgttcaccagttgcgcggcggaaatcgtcggcaccctgcgggacaaaggcttcgaagtgttcctcgacctcaaattccatgacatccccaacaccacggcgatggccgtcaaagccgcggccgagatgggcgtgtggatggtcaatgtgcactgctccggtggcctgcgcatgatgagcgcctgccgcgaagtgctggaacagcgcagcggccccaaaccgttgttgatcggcgtgaccgtgctcaccagcatggagcgcgaagacctggcgggcattggcctggatatcgagccgcaggtgcaagtgttgcgcctggcagccctggcgcagaaagccggcctcgacggcctggtgtgctcagccctggaagcccaggccctgaaaaacgcacatccgtcgctgcaactggtgacaccgggtatccgtcctaccggcagcgcccaggatgaccagcgccgtatcctgaccccgcgccaggccctggatgcgggctctgactacctggtgatcggccggccgatcagccaggcggcggatcctgcaaaagcgttggcagcggtcgtcgccgagatcgcctgatttttagagtgagcaaaaaatgtgggagctggcttgcctacgatagtatcaactcggtatcacttagaaaccgagttgcttgcatcgcaggcaagccagctcccacatttgtttttgtggtgtgtcagctgactttgagcaccaacttcccgaagttctcgccgttgaacagcttcatcagcgtttccgggaatgtctccagcccttcgacaatatcttccttgctcttgagcttgccctgggccatccagccggccatttcctgacccgccgccgcgaagttcgccgcgtggtccattaccacaaagccttccatacgcgcacggttgaccagcaatgacaggtagttcgccgggcctttgaccgcttccttgttgttgtactggctgattgcaccgcaaatcaccacgcgggctttgagcgccaggcggctgagcaccgcgtcgagaatatcgccgccgacgttatcgaaatacacgtccacgcctttggggcactcgcgcttgagggcggcgggcacgtcttcgcttttgtagtcgatggcggcgtcgaagcccagctcatcgaccaggaacttgcacttctcggcgccaccggcgatccccactacgcgacagcctttgagcttagcgatctgcccggcgatgctgcccacggcaccggcggcgccggagatcaccacggtgtcaccggctttcggtgcgccggtctccagcagagcaaagtaggccgtcatgccggtcatgcccagggcggacaggtagcggggcaggggcgccagcttggggtccaccttatagaaaccacggggctcgccaaggaagtaatcctgcacgcccagtgcaccgttcacgtagtcccccaccgcgaagttcggatgcttcgaggcaatcaccttgcctacgccaagggcgcgcatcacttcgccgatgcctaccggtgggatgtaggacttgccttcattcatccagccacgcatggccgggtcgagggacaggtattcgttgcgcaccagcacctggccgtcctggggctcgcccaccgacacttcctggtaggtgaaggtctctcgcgtggcggcaccgaccgggcgtttggcgagtagaaattggcggttggtctgggcggtcatggcaaggactctttagaaatggaacatgagtgatagaccctcaggggcagaagggcaagggtgtgcggcgcaggcgaatgcccggcaataggcctcgctgataatcagccgggcggctttatcactacgattcatgcagcgccaaccggccttctgatagtgctgatgcgcggctgccagcgttggctagactcgcctcaccgcaattaaccccacaggacagttcccatgagcatgacgttttctggccaagtcgccttggtgaccggcgccgccgctggtattggccgcgccaccgcgctggcattcgccgccgaaggcttgaaggtggtggtcgcggaccttgatgtggcaggaggcgagggcactgtggcactgatccaccaggccggtggcgaagggatatttgtacgctgcaacgtcaccctcgacacggacgtgcagcaattgatggcacagaccgtcgccacctatgggcgcctggactacgccttcaacaacgccggcatcgagatcgagaagggcaagctggcagacggcagtcttgatgagttcgatgccatcatgggggttaacgtcaaaggcgtgtggctgtgcatgaagtatcagttgcctttgctattggcccagggtggcggggccatcgtcaataccgcatcggtggcggggttgggggcggcgccgaagatgagcatttatgcggcgtccaagcatgcggtgatcggcctgaccaaatcagcggccatcgagtacgcgaagaagaaaatccgcgtgaatgccgtctgcccggccgtgattgataccgacatgtttcgccgcgcctatgaggccgacccacgcaaggctgagtttgccgcagccatgcacccggtcggacgcattggcaaggttgaggaaatcgccagcgccgtgttgtacctgtgcagcgatggcgcagcatttaccaccggtcaggccctcgcggtggacggcggcgcgacggcgatttaggacggcaggtcgcggggcattcgaaaacagggccaggtgctgtggggcgtttccatggcgggcagtgggctgtgctcgaatatgtttcactaggtaaataacccaataaaatcaatactttaataaaagttggcgaccggttttaccgggcttctgtgcttaactgttaggggttaacagacagttgaagtgagtggctcatggatttagggatcgatcgacaagccctggtaccggttgttcagcagatcgtcagcgcggtggcagaatggattcgcaaggagggggtgagccctggcacacgcttgccgtccattcgccaattggccctcgataacctgctgagccaggccagcgtgatcgaggcattcgaacgattggcggcccaggggttgctggccccccgacatggctcggggtttgtggtggcgtcacccacaacggtccacgaaaaccattggtatgaaggggccgaacagggctggggtgcattcaccgatggcccactgggccagctgaagctgggctgcggctggctacccgacacctggcgcgaaagcgatgacatcaactacgcgatccgcgaactgagccgtaccgacaccggcggcctgttcaactacagcacacccttggggttgccgacgttgcgcgaacaactgctcaagcgcctgacccagatacacgtgcccgctagcctggaacgtatcctcaccacccacggcgccagccatgcccaggacctgttgatacgcacgctgctcaagcccggtgatgaggtggtggtcgagacacccgggtatggcaatctctatcgccaactggcctttcagggggttacgctgctgcaagtgccgcgcacccgtggtggccccgatatcccggcattggaagcgctgctgcacacccaccggcccaagtgcctgttcatcagcagcctgtatcacaaccccacagggaccagtttgagccgtccggtggcggagcgcttgttggagttggcacgcgagcgcgacttcctgattatcgaagaggacgtttacggtgacctgcaacatgccagttgcacacgcttgtcagcgctggcccatgatgaccgggtgatctatgtgtcgagcttttccaagacactgagcggtgccctgcgcgtgggttacctgtgtgccaatgccgcgatcatcacgcaattggcccagctcaagaccctgacaggcatcggcacctcacgttttgccgaagccatggtggcgacgttgttgagtaacggcacttaccgtaagtgggtgcagcgcctgcgcaagcgcctgaacgcgcagatggccgcgacgttgcaggtgctggaggatgaagagtggcaggtatttgccgcacccgcaggtggcatgttcctgtgggcgcgaccgggcttggccgaccctttgcgattgcaagcctgcgcccagcgcctcggtgtgttgctgtcgccgggggcgttgttcagccccacgggtgagcgcagcgaatggctgcgcatcaatgtggcctacgcggctgaccagcgcgcattgacgctgttccgcgccatgggcgcggcaagatcgacctcgaccattctgaaaacgacgcacatgtagctttttgccattattgcggcgccagcggcttgtgctcagtgcctcggggttgcgaatctcgctgcttgtaaacctggcttatggcatttgccattgcaagaggatcaagtgcaatgatttcgggcgtgcaacgacatttcgccaacctcggtatggcaaaaaaactcggcttgggttttaccctggtactgctgctgacggccctggtggcggccatcggtgtgtggtccctgcagaccatcggccagcgcttcgaaggcctcacgtcgatgtcgacgcttaacagtgacctgctcaaggtgcgcttgatcgaacaagactatgcgctgcacgccgaccccaaggccgttgatgccctgcatgtcagtgtcgatgcgctgctggcccaggccacgcgtctcaaggctcggtccgccagcaacgagcgagtgatgggcgacgttgaacaagccttggtcgcctatcgccaggcattcgatgagttcgtcgagttgacccagaccaaagacctcgccctggaaatggccagttggtcggtgtccagcgtggccaataacctggatgtgctgcaagccgggctggcggatgacggtgcctatggccttaaggaaagccaaggcaaggagggcgcggagtttatcgagcaggccgggcaggtcagccaggtgtcgcgcctgatgttgcaggccatgaacgaggcgcgggtacgcctggaccagagccgcagggcagacgcagaggacgccgggcagggcaagatcgagcaagccgaccaggccctggctgaagtcgagaaactcaaaaccacggtcaaggaccccggctaccagaccgtgctcaatgaagtcgccgggcatatcgcttcgttcagtgaaaagctcggcgaatacaccgcgctgctggcccaggaaaaagtggtctacacgcaattgcatgaccgcgccgagcaagtggtcagccgggtcaaccaagcgtatgccgccgaagaccagtccatgcaaacacagttgcagcacagcacgctgttgatcatcggttcatctgctctggcactgctggtgggtttgatcgctgcgtgggtgatcacccgcttgattgttgcgccgttgcgtgcggtgatcgccgtggcccagcagatcgcctcgggtgacctgagtgggcgcatggaggtcagccggcgtgatgaaatcggccagttgatgcaggcgatgcagcagatgggcaacagcttgagccagatggtcagtgggttgcaggcggggatcgaacaactcgccagttccgcgcattcgctgtccagcgtcaccgagcaaaccaccgccgaagtcagcagtcagaaagacgaaaccgagcaggtcgccacggcgatgaaccagatgaccgccaccgtgcacgatgtggcacgcaatgccgagcaggcggcccaagccgcgcagaccgcggatgccaaagtcgatagcggccagcaggtggtacgcatgagcctgcagcgtatcgaattgctggccacgtccagcaacagtgccagcgccagcatcgaaagcctcagcgcgcaaatccagaatatcggtaccgtgttgagtgtgatccagagcgtggccgaacagaccaatttactggccttgaacgctgcgattgaggcagcgcgtgccggtgagcaggggcgtggctttgcggtggtggccgatgaggtgcgggcactggccaagcgcacccagcaatcgaccgaggaaattgaacggctggtcagcaccttgcgcagtgcggcgcagtcctcggtgcagcagatccagcagagcggcgagctggtgaagctggcggtcagtgatgcgctggaaaccgaaggggccctgggcagcattgcggcggccgtttcattgatccagcagatgaaccaacagatcgccgccgccgccgaggagcaaagctcggtggccgaagagatcaaccgcagcgttaccagtattcgggcgagtgccgatcattcggcgttgagcatgcaaggcaatgccgcctcgagcatccagttggcgcagttgggcgcgcaactcaaggggatggtggggcatttccgcctttgatcgcagccaaggcgctgcgatctgagggcagggcaatcagccgtggttggcgaggaaggtcagcagcgcctcgttgacgaaatccgggttctcgcgactggagatatgcccggcttcagggatcaggatcaggctgcagccgatcagctcggccatttcctcggattctgccggtggccggggtttgtcctgctcgccgcacatcaccaaggtggtgtcggagtccaatccaggtaattgcgccaggatgtcttcgcggctgaagatcaggcggcccagcggcacgatactgtccagcaagcgttctttggggaagctttgcagtgactggcgaaaatcctggtacagcgcggattcgcggtcgatgcccgggcggaagaagatcggtgcgatcacatccagcaacggttcggggatcgccccggcgtcttcaatcatcttgaacagcgagaaatagtactggcgcgttgcttcgggttcggccccgaggtaggtgtccatcagcaccacgctgttgatgcgctggggagccagcagcgccaggcgtgcgccccacatgccgccgaccgagaggcccaccaggttggcctgtgcgatgtccaggtgatccagcagtgccagggcctggcgggcaaggtcatccagggaatgggtgagtgctggcaacgggccggactccccgtggccccacaattcggggacgattacgcggtattgctgcgacagcgcttcaatctgcggcgcccacatgtcgctggcccataggtaactcgaacccagtagcacgacggggccggcgccctggtcgatatagtgcagcggttgtccatcaatcacggcgacaggcataacaggcctctaatttcacggagtgaggggcacttttttacgctagtcggaggcggggggataggtgcacattgatggcatgtgatgatttgggcgctgtggcaagcaagcttactcccgcgacggcccgccagccgccgcttatcttccgaacatcccctcacttcaaatgtgggagctggcttgcctgcgatgacggcctgccagccgatgcttgcctacctggcaccccacaatcgaactgtgggagcgggcttgctcgcgaaagcggtgggtcagcaacatcaatgttgctgggccgacgtcttcgcaggcaagccagctcccacctttgatcttcgttgctttgagcattgcgctcgcgttgccatcaatcgtaaatagctttcttcttccactcggcgtcagcgtcaacaactttcaagccctcggtcaactcgttgacttcgtcctcggcaggctggctgttggtcagcactgtggagttggcgcgcgccaattgggactccagcagttgcaactgggcgctgtagagcaccggctccggctgtttgcgcaagtactgcacgccgcgctcgaacgccaggcgagcctggccgggttggccttgcagcagggcgtgctggccgaggttgttgaaaaactcgatgtgcagcagcaccaggatatgccggatttccttgatccaatgcttggcctcgttggtcggcaggaagccgtcctgggcggcgcgggtgacttggccgtgcagggcttcgagcaaaaagcgcacgtccttggccttggcttcggtctggatcggtgccggcgggttggccactggaatcgactcgccttgggcgatcagcgcattcagttcggtgatacgcgccttgagtggtgcgctggacttgttcaggttcaacaggcgctggttgacgttcagctccaggcgagccagcaacagcttgagcgctggggtcatcagttgtccagggaaggtctcggtgatttcaccgcagcgacgcagccgatcgttaagctcgatctcggtgcgtttcttttccagcttgttgttttccaccacgtggttcatgtagccaatggcgatcagtattacgatcccggctattaccagcagggtgatcatgagtggtgtcaccggtgtgacctctttaatagggtgtgctgtggagtgtagtgactgggtcatccggcggataggaccgatcgaccagttgcccaggtgatttcttctatataggcaggcgttgtctgaatggatgcacattgccatcatttgcctgggtgaactatagcgccttgtcgaacgccagaatataggcgccaaggctcggacggtaccaatgcccgcgaaggccgtgaaaccatggcgaagtcattgatttaaataaatttatccttgggggttgacgacctttcaatccatccatagaatgcgcgccacttacagcgtaaagcacacagcgaaacgcggtagggagtgaatgttgtacgtgtgtccccttcgtctagtggcctaggacaccgccctttcacggcggtaacaggggttcgagtcccctaggggacgccatatgcgggaatagctcagttggtagagcacgaccttgccaaggtcggggtcgcgagttcgagtctcgtttcccgctccaatttacaagcagtgtggccctcgggcggcattgagtgaaaccaggaccaagtcttcggacaaggcctctgggcactggaacacacaccatgtgtttcagtagcgtgtccccttcgtctagtggcctaggacaccgccctttcacggcggtaacaggggnnnnnnnnnnnnnnnnnnnnnnnnnnnnnnnnnnnnnnnngcatccctgccggtttaccccccaaatccctgtcgaattccggccagcgtggtttaacggggcgcttaagatcaagatcaaaagcggctcgcttcgcatcgtggttaccgtcgggtacttcggcttatagagttgtatcgatacttatccctatggggaggtgcagctcagttgtaggttattattgtgaggcttgtagggaaagtctttgatttttgtagggtcgatgccttttcgccctgtgttctctactctggccacccattctccctgcccacttcagagaactgaccggatgcttcaactcgatttttattcaaccctcgttgccgcttcactggtgctattgctgggacgcgggcttgtggcccgtatcggctttttgcgtacttacaatattcctgaaccggtagccggtggcctgttggtcgccatgctgctcctggcgttgcgcgggtttgccgatatcgaagtacgcttcgatccttcattgcaaaccccgttgatgctggcgttctttgccacgatcggtttgaacgccgattttgccagcctgaagaaaggcggacgtatcctggcggtgtttttgctggtggtaacgggcttgctggtggtgcaaaacgccatgggtatcgcgttggcgtcggcactcgggcttgacccattgatgggcttgctggcgggttcggtgaccttgtccggtgggcatggcaccggcgcggcctggggggcggtgttcagtgagcagtatggcgtggcttcggcgtctgaattggcgatcgcgtcggcgacctttggcctggtgctcggcggcctgatcggtgggcccgtggcgcgttttctgatcaagcgggtcgaggtgccaggtattgggcaaccgcagtcgagcctggccaaggggtttgaacaaccgaatgaagagcgcctgatcacggcgttttcgtttatcgagaccctggcattggtcgcgatcagcctacagggcggcaacttgctgaatgccgccatccaaggcaccgctttcgaattgccgacgttcgtgtgtgtactgttcgtgggtgtcgtactgcgcaatgggctgtcgatgctcggctggcatcaggtgttcgagcgcgaagtctcggtgctgggcaatgtcagtttgtcgctgttcctggcgatggcgctgatgtcgctcaagctctgggacctggcggcactcgccttgccgatcgtcattctgctggccgcgcaggcattgctgatggcgctgttcgcgattttcgtgacgttccgggtgatgggacgcaactatgatgcggcggtgctggcggcaggccattgcggtttcgggcttggtgcaacgcccacggcgattgccaatatgcaggcggtgacgcagcgctttgggccttcgcagatcgcgtttttggtggtgccgatggtgggcgcgttcttcatcgatatcgcaaacgccgtggtgatcaagttgtacctggcgctgcctttcctgggcactgctgggtaagtttttcagcgcctgcccacggtgttcatcgcctgggccaggcgctgcgtggcttgctggatttcgtcccggtcgagagaggcaaagcccaggcgcagcgcgtttaccggctggtcgttgggtgaaaactgacgaccgctgcgcaccacgacgccgtggtccagtgcggcgtttgccaacttatcgacgtctatttcttcctcgaaacgtacccataacgccaagcccccctcgggctcgcgcacctgtatgcgagcgccaaacgcctggtccaggcagtctcgcaatacggtgcggcgcgcccgatattctttcgacacgcggcgcaagtgctttttcaactccccgtcattgatcaggtctgccagcatggcttgagcgaccgcatcggcatcgcccagcatcagcgcggcattgcgctgcagggcttcaatcacagaggtgggcgcgacgatataactgcagcggaacgtcgagcctagcaccttggacaacgagccgatgtacagcacatggcgttgggcgcggtcactggccagtggtaggtaagggcggccactgaaatgatattcgtggtcgtagtcctcttcgataatgcagaagtcatgcagcgcggccaacgtcagcaagtgctgccggcgtgcagcgtgcaagctcacggtggtgggaaactggtgatggggtgtgaggtaaatcatgcgcaccttgtgctcacggcataagcgctcgacctgatcggtgcggcaaccttcatcgtcgatgtcgaccgtgaccaactgcgcgccgagcttgcggaaaatttcccacgctggcgggtagctcaggcgctccaccagtaccacgtcgccaggcttgagcagtaggctggcactcaggtacagggacatctgggtgccctgggtcaggcagatattttcggcagtgaccgtcagcccacggttgttgcgcagcatctcggccagggcgcagcgcaagtgatagccggtgccttcgctgccgtagcgcacggtattggaggcgaagctgttgcgcaatgcatggcgatagtaacggtgcaaaacggcttggggcagcaggcggtggtcgctggtgccgttgtcgaaaaacagcgcgtcgtggcgatgctcaagcgcgaccacttgggcgttatgggtgaaatagggtacccgtggttgctccagcaacggcggcgcgaaagacggttgggtaacgccgggcagttgcttgggtgtcagctgcgcattgacgaaggtgccacggcgcggctcgctgaccagccagcccttggtcatggcttcttcgtaagccaggatcaccgtcttgcggttgacgttgagcaactgcgccatttcccgcgtgcctggcagcaatgttccaggtggcaggcggccctcgaggatggcattgaccaagccttcggcaatcttgcggtaggacgcctggccggcgccttcttcaagccgcagcaaggggcgccatttacgcatctggaccatctgaagtatccaaatctggaggttttaatgggcctagtctagcgcaacaatcaggtctcactcatcccgaggtctttatgaatacacgtcatgtcatcgaactctctccctcggggaaaacctttgaagcgggcgacgaactcttgctcgacgccatgctcgccagtggcctggccgtgccgttctcttgtcgccgtggcgcctgcggttcgtgcaaggtagtggtcgctgaaggtgcgtaccgggccaagcgcctggcgccgggcgcgccgcagccttcttatcctttggcagccaatgagatgttgttatgccagagccacgcctgtggcgacatgcgcctgcatattcccggctggtcgctggatacgcccgcgctggtagtggcggcgcaagtgcacagcaagcgtgcgctggggcccgatgtgatcgagttgatattgacgcccgaaaccccagtggcggtgcgggctggccaatacctcaagttccgcctggcggacggtgacacgcgctgcttttcggttgccaacctgcccgccgatgatgaagggcggttggtcttccagattcgccgggtgagtggcgggtacttttccgaggggatcctgggtggtctcgtcgtgggtgagcgtctgcacgtggaagggccgtttggtgcctgtacctggcaggacgatgatgcggcgcctgtggtgttattcgccacgggcactggttatgcgggcatcaagcctatcctgctgaccgcgctcaagcgcgatgtcgacgtgacgttgtactggggcggcgcgcaatcggtggatttttatgacagcgcatttctcgaccacctgatgcttgagcatcctcgttttcgctggcattgcgtgcggtcatccgagggcagagtgcaagaggttgcaatgagtcatgggcatcactgggaacaggcccaggtttatgcgtgcggcaacggtgcaatgctcagccaggtgcgggcccattgccttgaagcggggttgccgagtcaccggtttattgcggaggcgtttgtcgccagcggtcggtcaggtgctgaaacagcctccccgcgatttgacccggtctgggagaaagtcggcccgcgttattccttggacggcatgctggcggcgcgggaaaaatccatacgtgccctggcggcgattgccagccagttgaaggtcggcatgaccgccggcgaagcccttgagatggctgcccggcaactgcaggccatgggcgcttcgcacacctggcatccgacctacattcgttttggcgccgacactgttcgcccaccgcgagagggcatagatcgccagcgcaggctgggcgctaatgatattgccgtggtcgatcttggcccggtgtgggatggctacgaaggggactatggcgatacgtttgtgtttggcgatgcgccgttgcatcaggcctgtacaacggccttgcacgaagtgttcgatgaaacacgccaagcttggctgcgtggcctgaccgggcgtgaactctacgacttcgccgagcagagcgctgcgtcaaagggctggaggctggcgcgcaacctggcggggcaccgccttgcggattttccccacgcattgttcgagagcaaagagttggctgacctggagatatctccgagtgaaatggcctgggtattggagatccagttgtgccatcccaccgagccggtcggtgggttctttgaagacatgctgatgttgcaaggctgaagagcctgccattgttgccgagaattgcgcttatctcgattgccctgcaaagcgagatctcgcccacacaaccgatcccctgtgggagctgtcgagctttagcgaggctgcgaaagcggtgggtcaggcgctgaagattctgcctgtgccgccgccatcgcagcctcgccggggctccagctgcgtcagagcttcggcaactgcccgacgcggcccatcatttcggtgacgatctgcaggtccagcaagaactgctcaaccgtcttgaactcgctgtctgtgtgcccggtgtacttctcttccgggcgcgccaggccgaattgcacgccgttgggcaggtcatgcacggaggttgcgccggctgaagtgccgaacttgtgtgccatccctaggttttccgtggccaccgccaacaaggccttgacccactcgccttcagggttgcggtacatcggcgtgtcgagcgagtacgtgaagttcaccttgaccttggcatcctggttccaggcagtgagcttctgctcaatctgcgccttgagtgaatcaggggttttacctttcggcgcgcgcaggttcactgccagtttgaaggctttgtcatcttggcccacaaacgtcagcgaggtggtcagcgggcccatgaaatcatccgcgtagcccacacccaatttgccgcccaggtaatccaggccccagttgtcggcggcataccgcgcggcgtcggtgatgtggttgtgcttgagggcgaccttgccatccaggctatggatcaactccagcatgcgcgccaccgggttgactccggtttcgggctcggaggagtgcgcggacacgccggtcaccgtgagtttgacgtccttgccatcgaccttggccgtcacctgaaaattgccaccgttgcgcttggcatagtcggcaccggcctgttgcaggctggcggccaattcggcgggtgtatcgctgaccagcgtggccaccgaggccgatgggatctggttgttcgccttgccgccggtcatcgcgatgatctctgcgcctttgccttcgcctttgcgcaccgggaaggtggccatgaccgtccccgagcctttctcggcaatcaccaccgggtaaccgccatccagcgccaggttgtattgcggcacgggattgcgctcgaaatagtaaggaatagcctcaccggaagtttcttcggtggtgtccaccagcagcttgaacgtgcgcgccagtggcagcttttcttccttgatcaccttcatggcgtacatcgtcaccacgatgccgttcttgtcatcctcggtaccgcggccatacatgcggtcgccgatcagcgtgaccttgaacgggtcgagtttggtgccgtcttgcagcacccagttttccggggtgaccggcaccacgtcggcgtgagcatgcacccccacgacttcatcaccgctgccttccagggagatttcgtagacgcggttatcgacgttacggaagttcaggttgaaggacttggccagggcctcgatcttcgcggcgatcttgaggaattccgggttattgtattgcggcaggccgtctacgttaaacgtagggatctccaccagttcacgcagggtttcgagcgcggctttgccatatttaacgcgggtgtaaatgcccagcaggcgattgatctcgttctgctgctcggcgctcagggttttgttgcccagaaacgcgctgatagcagtgccggtgtcagccgatttgccgaactcgcccttagccagggtgccgaggaaactgcgaaaatcggtgaccgaggtctcgctgaactgcttcaagatggctgcgctttggtctgcggtgatgttagcggatgcgggagtggcaactgccgacaggctcgcggcgaacaaggtggcagccaccagttttttcagtggaaagtgcatggttaaaggcattcctttgcaaagtgaatgtaggaaatattctgatcgttatgtcagaaacaatttcacacactaacactgcaaaggaacagtaggggagaccttgaacaaggaaaaatcctactttaataaacgcaccgttcattagtcgctggctttttcagagttagggccgaaccaaatacaaggtctgagtgaaggtaccatcggggttgggttcggagctcatttcgccggtggaaccggcataggtgcctgtgctgccgacgacggcgaccacggattttccggcttccagttcctggccggcgactaccacggtacctgtaacagcgccacctgagccgaagaacagtaacgtccattggcattggctgtgaacgcctggccgtgtgctgacacagtagccactgttgctgccgatatcacggcggtcctgatccatcagtggttggtcgaacacgaacagatcgccctgggaagggccaggagggccaatatcaaccgcgctcttcaaaccgcgggtgccgtcggcgagggtgaccagcgtgatgggctgacggctgttgatgcaagctgcgagggagataagcataagcagcgtacaagtggtgcgaagcaaagcggttttcatggctgtggtctcgtggcaagtggactccggacgcagcaccgctaaagctgcagccggaaaatgctaagactagcggccaatcaggaaaacacaacgccgtgcctgcgcgccgtcacttaccgcgtacctgggtggggaggcgcatagtcggccgacacatccagcgctttggcatagggcccatcccacagctgttcatgcaactggcctacgcgcttggccatcgcctcactgcgcatcaccacctccagattgcgcgaattatccaggtagccgcccaaccaattgctggtgccaacccacgccacctggccgtcgacctccatggttttactgtggatcacccgcgcataagggataaagccttgcttggcttcgggcagggtgacgatcttgatctcgacattaggcagcaccgccaggctcttgagataaggcagctccagtgggtcggtgttccagttggacaccatcagcttgatcgacacgccacgggcagcggcggcgcgcacggcgttgtcgatcacggcgtagtacggccgggtgcgatccggtccgtaggacagcggcgcgtagtcgagcaattgcacgcgcacttcttttttggcttcgcccagcaggcgcggcagttccagctgtgagtcgcccacgccgggcgggttgtagcgttgcgggctggccaccaagtagttgccggtacgtgcaggtgcctggccgctggcgggtagcggcaccgggtgtttccccgccagcgcggcctgagcttgccagtcttgctcgaagatcgcctgcacctggcccgccaccgtttcgtcagtgatccgcagcccggtttcgtggatgtgttccagggcgcgccagtcgaaattctgactgccgacaaacgcttgcttgccatccaccagcaggtacttggcgtggatgattccgccgctcagttgcccgtaaggcagcacgcgtaaggtcaggttgggaatggcgcgcaagcgttccagggtggcggcgtccgacagcttgatgcctttttcttcgagcaggaaacgaatcttcacgccgcgtttgccggcggcttccaggtgatcaagcaccttgttcatcaccgaacctgggtggtccgcggcgtagaactggccgatatcaatgcggcttttggcgccgtcgaacagctcgatccataccgggccgggctggcgtaaatcgtcggtgctaagggcggtgtccacgggcacggtgtgcaccagttcaaagcctggaatggaaaagtccgcctgggccaacggactgaggagcaagccggtcaggccggcgatacgcaactttatcgaaagggacataagcgtctcatcgcaccaaaggaaaaggcgagcgcccaaggcgcccgccctgcaggtcaggccgtgcggctgtgcagcggggtgggcacgcgatggggcacttcatcctgtgcgcgggcgccggtggcggcgcggatcaacaggatcttcaactggtcgttgatgcgctccaggctgtcctggaaaaagttgtgaaacaccacgcaaaacagcgcgatggcgatacctaatcccgtggcaaacagggccgtcccgataccaccggaaatctgccctgggtccgacacgcccgcggtggccagcgccttgaaggtgtctatgatgccgagaatggtacccagcaggcccagcagcggggcggcggtggtgatggtctcgatgatccacaggctgcgggtcagtggggcgcgggtcttcaggtactgggtatcgatttcgtcgtccaagtctttgcgcgaaccgtgggttgccttctgggccagcaccggcaagatcatgttcagcggcaggctgtcgcgacgggtcaggttttccggcaggtcgcgctcgctgtgtacgttggcgcccagggcgtcgatcaatgcgcgagcctggcggcgtacgtaggcgaagtagataccgcgttcgatggcgatgaagatcgcaatggccatcgccgcgtacatcacatagaaggtgacgtcgtggagcaggttcatatccatgatggtgttcctcttgaggtgagtcttagaaattcgcttccagcgaaaccgtgacggtacggtccaggccgacgatgtatgccgggtcgccatcgcggaaaccgctgtagctggccgcgttggtcttggtggtgtacacgccgtccaggtatttcttgtcgaacaggttgtcgacgttcaggcgcagggtcgcgtccttgaccaccttcttgtccaccggcaggtaaataccggcgccgaggttgaacacggtgcggccggaaatcgcctcgtcgttggtcaggtcaccgtagagcttgctggtgtacttgccgccgaaggtgccgtagaagcgaccgtcgtcatacccgatgttggccgccagcatgttcttgggcacgttggcgaactgcttgccactggtgggcagcacgatgggtttgccggcgttgtagacggtcaggtcatcctgctgctcggccttggtgtaggtgtaggaggtgtagtaattgaagtggtggggcaactggccgctccactccagctccagccctttgttgaccacggagccggcgttgatgtcggcaaagtcaccgttgatgtcccgggacgacacctggcggttcttgaagtccatgtagaacagggtggcggccaggttcatgtcgtcgccgctgtagcgccagcccagttcatggttccagctggtttccggttcggcgtcgatcgaaccggcgcctttgtcgtagagcacgtagttctgcggcacgcgcatgttgcgcgacaggctgtagaacaactggtcacgctcgtccagctggtatttgaggccggcgttgggcagcagtttgttgtaggtctggttacgtttttccgggcgttcgttgaggctgccgtggttggtgccttcacgctcgacgttcatgtaggccaggcctgcgatgaaggtccagtccgggttgatgtaccaggtgtcctgggcccagaccttttgcgcaggcgtcacggtgaaacggtcgcgaccctgcacggtgttgccgttggcatcgacgatggcgctgttggaatccggccaggtgtccaccggcttgccgttgctcttgagcggaatgaacggctgggtctggctctggcgtgcgcgctcgtaccagtaaccgaattgcaggctgtggtcgcccaggtcccaggtcagcttggtggtgatacccggacgccaggtttgcgtacgtgaagggcggtagtacacgccgctgttgggtgtgccgtcggcgttgtattgggcggcggtgggcaggttgccgaggtcgaacacaccgccctggttggagccacggttgagggcatagctggatgaaccgacgccgctgccattgccccagtagtaatacgggatcaccgacagcgcgaggttatcggccagtttgaactgggtgttgagcacggcggtgaacgtctggaacgggttctgcgccagggcgtaatagctgttgtacttgccgttgctgcccacgctgggtgttgccggataagggtcgtacttgcggccatattgctggaactgcgccttggtcaactggctgtaactgttgttgtcctgctcgtggtacttgaggatcaggttggcggtgttgccattgccagcgtcgaaaaagctgttccactccaccttgtccgcgcgtaccgcgcccgaaccgcgccacatctctccttcggtatgggacaccgacagccagttgctcaagccgttgatttcgccggtattgaggcgggcaaaggtcttgcgtgtggcattgctgccgacgacctgtttgacgaaggcgccggtttccttggtcgggcgaatggtcacgatgccaatgttgccgccgctggaaccaatgtgcgggccgtcggactccgaagcgccttgggtaacgaagatctggtcgatgttttccgggtcgcccagcaggttggaatacagcgcgtagttgcccgaatcattgatcggcatgccgtccaccgacatgcccacctggtcggagttcatgccgcgcatggtgaagcgaaagcccgacaagccggtgttgtcttcgctggagatgttcaagcccggggtgtacttgagcttgtcgatggcattgccggtggccgcctgtttatccagtgcttccttggtcaccgtggagcggcccttgatgctttcctccggcaccatgtaaccgcccccggcggtcgccttgccttgtaccccaatggtgccgacgtcgctggtctctgccatgaccattccctgggtcatgctggtcgcggccacaagtgccagatgaatacgggtgaacttcatcactgtcgtcctggtgtcgggtgcttattgcacgctgtagttgaaggtggcggtgaagcgctgctcattgcgccccccgaaggcttgctcggggaacggtttgacttgcttgatgcgacgcaagctgttggtggctgcccggttgagcaacatgctcgaggcctgagtttgtaaccctgagtcgagtacccggccttggcggtctaccagcaaccacaccaccacttcgccgctcgggcgttcgagggacgcctgacgcccggtggggtactgcttgtaggtgtccagttcgttgcgcaagcctttgagataaccgctttccagggcctggccatcgactttcggtggcgccggtggggcgggtgtaggtgccgcttgggccaccggagccggggctggtttggcggccaccggtggcggtgtcggcgatggcttggcgaccacgggcgcaggcttgggcacaggttttggcttgggcttgggttcgggttttggcagcggcttgggcggtggcggcgggggagcaggctcggcctcttcctcttcgatcaccggcggtggcggttcttgctccaccaccggttccggtatgacctccggttccggctcgaccaaggccaattcgaccgccgactcgtcatacaccggctcgactttcaacgtctgggactggatacccagtgcaatcagcaccagggcgatcagggccgggacactgcccagcagctgacgcgcacgaaacagaacgtacatgatcaggacttacgcgtggcgatggacacggaggtgaagccacccaggcgcagggtgtccatcacttccaccaggcgcgaaacctccacgcctttgtcgctgttgacgatgatcgtcgacttggtatcgggcttttcggcagccttcagcgccggcaccagggcatccaccgtcacgtccttgccgtccagttgcaactggccttccaggcccaaagtgaggatgaatttgttctgcggcttgagctgttgcgagctgctggcgctgggcaattgggtcttcatgccgagcgcgggaatcacgttcaggctcaccagtacgaaaaacaccaggaggaacatcatcacgtcgatcatcgggatcagctcgatgtgcgccttgcgtttcttgggttcgtcccaggttctcattccgttaccccgtcattgaattaggggcaaaacgctaacagccaaaaatgaccgattggttaactttaattgaccgtttagaggctctaggacgcgtctttcagaaaacttaccggtcagttttcgggcgtaatgaaactgacactcggggcatccatgcttgagaaatttatcttgagagccggcctccatgcctactgcattgcctcaattgacgaccccgcgactgttgttgcgcgccctgcaaatgcaccaggcgcaggtgcttttcacgcttgccaacgggccgaaaattgccgacaacacggcgaacattccagcgccctacaccttggaaaccgcgcaggattttattgccgggatcgctgacaagtaccgcaccggtgagctgctgaatctggggatgcatgtgcgcggcaccgatgaattggtcggcatggtcagcctgcgcatcaatgctcgccatcgctatgggcacttgggtggctgggtggcggcgcactgccgtaaccaggggtatgcggctgaagcggcgagtgcggtgatggacttcggcttcgaggcgctagggttgcagcgcgtgggcagccagtgtttcgcgcgcaacaaggagtcggcgcgggtcatggagaagatcggcctgcgctatgagggctgcatgcgccaggcgtttttaaagaacggcgtgtatgaggacatgctcgggtttgccaccgtgcgtgacgactgggagcgctgcctgtgagcggcgaagtcgaccacggccggcgccgggtcctcggcgggctggcggtcgccacggcgttttctattctcagcccgtttgcgcgcagtgccggggtggattatccgttcccccttggcgtggcgtccggcgacccgctgccagatggctttgtgatctggacgcgcctggcgccgttgttcaatgcggcggatggccgtggcggcttgagccgcacggtgccggtgcgttggcgggtggccagcgatgcggcgatgacgcgcattgtgaagcagggcgaagtactggcgacgccgcgttttgctcacgccgtgcatgtcgaagtggcggggctggcggcggatcggccgtattggtaccagtttgaagggctcggcgcgcagagcccggtggggcagtcgcgcacgatgccgccgctgcaggcgatggccacggcccggctggggttcgtgtcctgctcgcactgggagcgcggttacttcagcgcctaccgacaccttgccgccgagcagccggacctggtgttttttctcggtgattatatttacgacagttcctatgcggcggagtcgggcaaggtgtttcgctctcacggcagtggcaacgcacaaagcctgagcgattaccgcaaccgctacgcgctgtacaagactgatccagacctgcaggcccttcacgccgcggcccccagcgtcgtgacctgggacgaccacgaagtacagaatgactacgccaaccgctggtcccaggacccgaaggtggcggtggcgcagtttctcaagcaacgggccgcggcgtaccaggcgttttacgaacacatgcccctgcgtgccagcagcgtgccaaagggggcggatatgcgcatctaccggcgcctggattacggccggcttgcgcgtttccatgtgctcgacggtcgccagtaccgttccgagcaaccgtgcatcgcggccaatggcagccaccaagggcatattgtcaccaccccttgcagcgacctgcgtgaccctggccgcacgttgctcggctggcagcaagagtcttggctggaccaggggtttgcccagtctagggcgcagtggaatatcatcgcccaggatttgctggtggcgccgctgatgcagcgtgacctcaccaaccacaagcttggccgctggaccgatggctgggatggctacatggccaaccgctcccggatgctggcgtcgatcgtgcgtaaccggctgaagaacccggtgttctggggtggggatattcattcgttctgggccaccgacctgcatgccgacgccgacaggccagactcggcggtggtcgccaccgagtttgtcggctcgtcggtcacctccgacggcccgccctatgacgcgttcatgaagatcatgccgctcaacccccatgtgaagttcttcgacagccgtcagcgtggctatgtgtcggtggagttggcggccagcaccatgcagacgaattttcgtgcgatcagcgacccgtgtgacccggcggcgacggtgtcgacgttgaagtcgttcgtggttgagccgagcagggcgggggctattgccgtgtagcctgtttctctggggcgatccaatgtgggaggggggcttgcccccgatagcggtgtgtcagtcactgcatctgctactgcactaacgctttcgcaggcaagccagctcccacagggaactgagcttaactgaatggcattaaggcaagcctcctcccacattgatttcatagcgcaccgagagcgcgccttttttctcggacaacgccaagatcgttacctggcccagttcgctcaacgtttgaacatgcgtgccgccacaggcgtaagcgggtaattcgccgaagccgacttcgcgggtgccgtcttccagtgtcatgtggcggggatagtcggcggcgatccatgtgttgagccactgctggagcgtctgcgcatccatgtcttgcgcggcctggccacggataaaggtgatcttgccttcgcccggccaatgatgcgccttgatcggcatccagccgaggcgttcgccagcattgccaatcaagtgccccgccgaatgcaggcgcgtatgcaaggcgcgacgctgtgcgtcgactcgcgcaatggcgggtcctggttccagggggcggtcgacgtagtgcaccacctgttcggcttgctgcatgactcgcagcacctgggtgtcgccgagccatccggtgtcgaacggctggccaccgccttggggatggaaaatcgtcgattgcacaatcacggcgaattgctcttcgtacggggtgcaactgagcacttccaactcggccgtcaggtggtcgtgggtaaaaaacaggcgctcggtcattatctacatccgcatcagggttctgtgggcagtataaatagtgcgcagatgagtgataatccgctcaattatcaatggacctgtgcgtcatgagcatcaatcttcctttgccgttgttgggtgaaatggcgattttcgtcaaggtcgtggaaaccggcagcttctccgaagcggcgcggcaactcagcgtttcaccttcggcggtgagccgcagcatctcgcgcctggaaaaagccctggccacacgcctgctgcaacgcaccacgcgcaagctgcgcctgagcgagggcggcgaggaggtgttcaagcgttgccaggagatggtcaatgctgcgcgctccgttatggaagtcagtgggcaatttacccatgaagccgagggcctggtgcgggtcagtgtgcccaaggcggtggggagatttgtggtgcacccgcatatgccggaattcttgcggcgctatcccaaggtggatgtgcagttgatcctggaagatagacatgtggatttgatcgacgacaacgtcgacttgagcatccgcatcaccgacagcccaccgccaggcttggtcgggcgccagctgttgcccatcgaacatttgctgtgcgcgacgccgcagtacctggccgagcacggtacaccgagccatccccatgatctgctcgggcacagttgcatttatctgggtgaaacaccggcagattcacgctggaagtttcgccaggctggcaaggcggtaacggtcggcgtacgcggccggtatgcggcgaaccacaccggggtgcgactggaggcggcgttgcagcatgtcgggattgctagcttgccgtatttcaccgcgcggcacgcgttggaagcgggggatttggtgcaggtgttgccggggtgggattttattgcctcgtaccatggcgaggcgtggttgctgcattcgcccacacggtacctgccgccgaagttgcgggtgtttatcgattatctggtggagtgcatggccagggagcccacgctgcgccgacggtaggaacgcggttgctcgttcccacgctctgcgtgggaatgccaccttggacgctccgcgtcctgcctttatgcctgtgcgcgggtgacgcagagcgccacaggataggttcccacgcagagcgtgggaacgagcatagttgtcagtgtttgctctggtcctgaggcatcgccagcagttgtttttcctggttccagtcgaacggttcgtcgttctgtttgctcgttcccacgctctgcgtgggaatgccaccttggacgctccgcgtcctgcctttatgcctgtgcgcgggtgacgcagagcgtcacaggataggttcccacgcagagcgtgggaacgagcatagttgtcagtgcttgctctggtcctgaggcatggccagcagttgtttttcctggttccagtcgaacggttcgtcgttctgttcggcttcatagcgacgttcttccagggcctggtacaggtccagttcttcgtcgggcatgaagtgcaggcagtcgccgccaaagaaccacagcaggtcgcggggcaccaggtgggcgatttgcgggtagcgcaggatgacctggctcatcaggtcctggcccaggtactggctttcgatcgggtcgattggcaacagggcgcgcagttcgtcgaaacgctccaggaacagcgagtggctttcctcggggacctgttcggcttcgccgacggcaaccaggatgctgcgcaagtggtcgagcaagacgagatgatcggcaacgacgttggacacgagataaggcctctaaagcaaaaacgggcgcgagagtataagcctctcgcgcccgtttttatatgaccgctcgactcagcggactttaccctctgcctgcatcagctcttccttgctgaaatcatccacgtcgatcaccttgcgtcgcgccgcctcggcatcgcgcagggtttgcgcctcggccggttgcagcacgccggcctgcaaggccgcgtcgatggcgtgctcgccggccaccggcttgacctggccgcttttgagcgcgctgtggagttttttctgcaaggggtggctggcaccgagcaggtcgtaggcatgttgcagggcgcccacgggatcttctgccgattgcgggcgataacagccggccagcaactcttccaaggtcgggtcgcctttggcgcggccgatcacggctgccacttcggcatccagagcgtcggacggcccggtatgacgacgcccgaatgggaacacgatcacccgcaacagacagcccagcaccttgttcgggaagttgctcagcagctcatccagtgcgcgttccgattcacccaggctttcttccatggcccaggcaaacagcggctccaggtggtccggcgagtccaggtcgtggtaacgcttgagcgccgccgaggccaggtacatgtggctcagcacatcacccaggcgagcggacaggcgttcgcggcgcttgagctcgccacccagcaacatcatgctcaggtccgccagcagggcaaacgcagccgcctggcggttcagggcacggaagtagccctggctcaaccggttgcccggggctttttcgaagtgccccaagcccaggttcagcaccagggtgctggcggcattgctcacggcaaagccgatgtgttgcatcagcaggccatcgaattccttcaacgcctggtcatggtcttcgcgaccggccagggccatttccttgagcacgaagggatggcaacgaatcgcgccctggccgaagatcatcaggttacgcgaaaggatattggcgccttccacggtgatgaagatcggtgcgccctgccagttgcggcccaggtagttgttgggccccatgatgatgcctttgccgccgtgcacatccatggcgtggctgatgcactcgcggccgcgctcggtcaggtggtacttgaggatcgccgacagcaccgacggcttctcgcccaggtccacggcgttggcggtgagcatgcgcgcgctgtccatcagccaggcgttgccaccgatgcgcgccagggcttcctgaatgccttcgaaggccgacagcggtacgttgaactgttcgcgcacctgggcatattgcccggtcaccaggctggtgaacttggcggcgccggtgccgacggcgggcagcgagatcgaacggccgaccgacaggcagttcatcagcatcatccagcccttgccgagcatttcctggccaccgatcaggtactccagcgggatgaacacatccttgccggagttggggccgttcatgaaggcggcgccgagcggcaggtgccgacggccgatttccacgccaggggtgtcggtaggaatcaacgcgaggctgatgcccaggtcttcttcttcgcccagcaggtggtccgggtcatgggccttgaaggccaggccgagcaaggtcgcgaccgggcctagggtgatgtagcgcttttcccagttcaggcgcaggccgagggtttccttgccttcccattcgcctttgcagatcacgccggtgtcgggcatggcgcccgcatcggagccggccagcgggccggtgagggcgaagcacgggatgtcgtcgccacgggccaggcgcggcaggtagtggttgcgttgttcctcggtgccgtagtgcagcagcagttcggcggggcccagggagttgggaaccatcacggtggaggccaggtcaccgctgcgggtcgcgagcttcatggcaacctgggagtgggcataggcgcagaagcctttgccgccgtactccttgggaatgatcagggcgaagaaaccatgggtcttgatgtgttcccaggcttgcggcggcaggtccatggcctggccgatttcccagtcgctgaccatggcgcagagttcttcggtggggccgtcgatgaatgcctgctcttcctcggtcaattgcgccttggggtaggccaacaatttgtcccagtcggggcggccactgaacagttcgccgtcccaccagacggtgccggcatcgatcgcatcgcgctcggtctcggacatcggcggcagcactttctggaaccagctgaacagcggcttggtgaagtattggcggcgcaggtcaggcagcaacaagggcgcggccaccacggccaggagcacccagaagatcagcagcagccaacccggtgcgtggctccaggcgcccatcgccagcaggtagacggcgaccacgcccagggcgggcaggggggcagtacggcggtgtgccaggtaggcaatgccgaccaccagcaccagtatccacaacaacagcatattcaatcctccgtgaaccaggggcgaaaccaccagggagcttagtcggcatccgaacaagccgggtgatcagggtgtaacaaggtgtactgggcaacccatcagccggcgccggcatttggccgaatcgtcgttatctctcgggcaggcctggtggttaaactccaggctcccctcggagatcaagctcatgaatacgtacttgagtcccagccgcttcatcgatagtgaccaccctgtggtggtggagttcgccgagaaacatcgcggaacccgcccggatttaagtgaccaggcagtcagtctttactacgcggtgcgtgaggccattcgctacaacccctataccttcagccgtgaccctaacaccttgaacgccagcttcgccctggcggctggcgaaagctactgtgtgcccaaagccacgttgctggcagcttgcgcacgtcactgtggtatccctgcgcgcattggtttggcggacgtacgcaaccacctgtccacaccgcggctgctcgccctgctcaaaagtgacgtgttcgccatgcacggttataccgagctttacctgaacggccgctgggtcaaggccactccggcgttcaatcagcaactgtgcgaagtgttcgacgtgccgccgctggaattcgatgggctgcacgacagcgtgttccacgcgttcaatcgccagggccagcgttcgatggagtacgtggtggaccatgggcagtttgctgacgtgcccgaagcatttttcttcgcgcatatccgccagtgttacccgcacttgtttggcgacgatgcgcccaccttgctcggtgatatgcagggcgatttaagccgcggctgaaccggcgtatgctgctgccttcatcaagccatgttcatcaacgataaggcgcggtcatgctgaagatctggggtcgtaaaaattcatcaaacgtcaggaaagcactgtggtgcgccgaggaactcggcctggactatgaagcaattgatgcgggcggggcttttggtgtggtcgataccccgcaataccgggccatgaaccccaatggccgggtgccggtgatcgaagatggcgactttgtgctgtgggaatccaacaccatcgtgcgttacctgtgcgccaagcaggcatcggacttttaccccagcgacttgcaagcccgggccaacgccgaaaagtggatggactggaccacttccacgctcgccgatccgttcaaagcggtgttctggggcatcgtgcgcaccccggctgaccagcaaaactgggacagcatcaatgccgggcgccaagcctgtatcgacgcgctcaaaaccgtcgaacaagccctcgccgagcaaccctacctgtccggtcaggcgttcggcatgggcgatattcccttgggctgcttcatctacgcctggttcgagatgcccatcgaacgcccggcaatgccgaatctggaggcctggtaccagcgtttgcaacagcgcccggcctaccgcaaggcggtgatgaccgcgttgacttaatacacactattaatacgggtgactgtacttgtgcggcatgggcacgcaccatgctcgcactgcatcgcaggttgaactacctggggtgtgccttcatctattctttctattcccttctttggtgcgtacttccatatgagttccgctctgtccatccggcagctaaccaaaacctacggcaacggtttccaggccctgagtggtatcgatctggacgttgccgaaggtgacttcttcgccttgctcggccccaacggtgccggcaaatccaccaccatcggcattctctccaccctggtcaacaagaccagcggcacggtgaatatcttcgggcatgacctggacaaatcgccggcggcgctcaagcgctccattggcgtggtgccccaggaattcaatttcaaccagttcgaaaagaccttcgatattgtcgtgacccaggctggctactacggcattccggcgaaagtcgccaaggaacgcgccgagcagtacctgacccaactgggcctttgggacaagcgtgacgtgccttcgcgctcgctgtccggtggcatgaagcgccgcctgatgatcgcccgcgccctagtgcacgagccgcgcctgttgatcctcgacgaacccaccgccggcgtggacatcgaactgcgccgctcgatgtggaccttcctcaccgaactgaacgagaagggcatcaccatcatcctcaccacccattacctggaagaggctgagcagttgtgccgcaacatcggcatcatcgaccacggcaccattgtcgagaacaccagcatgcgcaacctgctgggccagttgcatgtggaaaccttcctgctcgacctgaagaacaatctgtcgctggccccgcagttgctcggctacccgagccggctggtggacagccacaccctggaggtgcaggtggataaagccatgggcatcaccgcgttgttcacccagttggcgactcagaacatcgaagtgctgagcctgcgtaataaaaccaatcgccttgaggagttgttcgtgtccctggtggagaaaaatctggcgaaggtggcggtatgagttccgaactgcaacccaaccttgtcgcgctgcaaaccatcgtctatcgcgaagtgaagcgctttacccggatctggccgcagaccctgctgccaccggcgatcaccatggtcctgtacttcgtgatcttcggtaacctgatcggccggcagatcggcgacatgggtggtttcacctacatggagtacatcgtgccgggcctgatcatgatgtcggtgatcaccaactcctacggcaacgtagtgtcgagtttctttggcagcaagttccagcgctccatcgaagaactgatggtctcgccggtgtcaccgcacaccatcctgatcggctacaccttgggcggcgtgttgcgtgggctgatggtgggggtgatcgtgacgctgctgtcgctgttctttacccatctgcaggtgcatcaccttggggtcaccattctggtggtcgtgctgacggcgacgatcttctcgctgctgggctttatcaacgccgtatttgcacgcaacttcgatgatatttccattatcccgaccttcgtgctgacgccgctgacctacctgggcggggtgttttactccatcaccttgttgccgccgttctggcagacggtatccctggccaatccggtgctgcacatggtcaacgccttccgctacggtattctgggcgtgtcggatatcaagatcagtgtggcgatcacttttatgatcgttgccaccatcgtcttgtatatcggctgtgcgcggttgctggtgagtgggcgtgggatgcgtacatgatgtgggattggaaataacaaaacggcctcatcagaggccgttttttattggatgcacaccgaacaaatgtgggagctggcttgcctgcgatgcacataggtatctacacaactttttagttgtagccgtcaacggtaaccatgatgcgaagcgagtcgctcttgatcttgctctgcttttgatctcaggcgccccgttaaaccacgctggcggaacgcaggcttgaattcgtgggtaacccggcaggacgccgggttagccgccccgcgccatggatggcgcgtggcggcggcccacggattcaagcctgcgtacgggcacaccgagcctaggcgaggtgccgagtggtggggcaagagcgttttgcttactttggcctgggccggcatcccggcttttgcaaagtgagccgccgtcagggcggaaccctaagtggccgttaccgcagnnnnnnnnnnnnnnnnnnnnnnnnnnnnnnnnnnnnnnnngcttttgcaaagtgagccgccgtcagggcggaaccctaagtggccgttaccgcaggaatggataggtactcggtataacagtctcggctgtcatgccgccttcgcgaacaagcccgttcccacagtgggatcgtggggtgtcaggtagataagcatcggctggaaggccgtcatcgcaggcaagccagctcccacattttggtcggcgcacgcgctttagttttttagtgtcagttcgatcagggcgtgcagctcttctaccgccaacggctgggccgaaaacagaatacgaaacaccgtcggtgcggcgagcaggttgatcagatggtcaacgctcggcggctgttcctgcgggtagcggtccacgatcacctgcaactgcccactcaggatgctcacgcaatacccaggcgtggggctgctttgcacgtcgcgcatcatgttgcgccccacttccgaactcatctcgtccaggtattgctcggcccaggcttgcaggtcgccgcgcaggctgccggtgttggccggctcgcagtctggacgcatgcgcgccaaggccacatcggccagcagcacggagaggtcgccccaccggcggtagacagtagaaggcgtgacgcctgcgcgcgccgcaatcatcggcacggtgacgctggaccgctcatgggtttccagcagttcgcgcaccgctccgtggacggattcttgtacccgggcactacggccccccgggcggaggccttctttgatcgccatgggcaggaccttaacacaaagaatttgctttaagcgccagcgagtagcacactgcgcaaaagcaaagtattagctttagcggagcgtgcccatgtccagcgtcatctctcagcggtccagcctggcgtttctggtgatcaccgtgctgacctttctcgctgcctccagcgcgccgacgccgttgtatcaggtgtatcaagaccacctgcatttttctgcggcgatgctcacggcgattttcggcgtgtatgccgtgagcctgctcgcggcgctgctcaccgtgggctcgctttcggattacctggggcgcaagccagtgatcttcgccgcgctgctgctcaatagtgtggcgatgctgctgtttatcgttgctgacagcaccgcctgcctgctggccgcccgcgccttgcagggtttcgcgaccggcacggcgaccgcggtattgggggcgacgctgctcgacaccgaccgcatgcgcggcccgatgctcaacagccttgcaccgatgctcggcatggccagtggtggcctgggcagtgggctgctggtggagttcgcgccatggccgacccaattgatctattacgccctgctgggcttgatggtgttgcaggctctgtatgtgtggcgcctgcctgaaacggtcagtcgcataccgggcgccttgaagtccctggcgccaaccctgcatgtgccaccgcaagcgcgccgcgcgttgtggttggcgatgccattgaatgtggccgtgtgggcgctgggtgggttcttttcctcgttggcgccgtcgttggtgcgcgtcgccacgggttcgacctcgcacttgatcggcggcgggctggtggcggtggtgaccttgagcggtgcggtgatgatctacagcctgcgcaaccatgcggctgacagggtgacgcgcttgtcggctgcactgctggccgtgggcgtggggttgctgctggttgccgtaaacaccgccagcctgtggctgttctttatcgccagtgtgatcgcaggcctgggcttcggcggcggtttcatgggtagtgtgcgcagtatcgtgggcctggcgttgccccatgagcgggcgggcctgatgtcggcgttctacgtattgagctacctggcgttctgcgtgccagcactgttggcgggtaacctgagccgcgtgtttggcctgatcgcgactacggacggctacggtgcggtgcttattttgctgtctctcggcgcgcttgttgggttgttgtggcgggacacggcgcaggcaagggcaagcgcatgattgcgattaatataggtaaaatagataacagttagagatattacccgttatatagatattcgatcaggttctatcatggtttcaacctcaaatgaggaagaggatttacccatgacctgctcgaccactcaccgctacaaacccttcagtcacctgacccgtccccgggaagtgattcgccagttcaccccgaactggttcgccgcgaccatgggcaccggtgtgctggcgctggccttggctcagttgccagtcaacttgccaggtttgcacgctgtcgccgagggcctgtggctgttcaccatcggcttgtttgtgctgttcagcgtgctgtatgccgcccgctgggtgatgtttttccacgaggcgcgacgcatcttcgggcactcaacggtctcgatgtttttcggcaccatccccatggggctggcgaccattctcaacggtttgctgctgttcggcctgccgcgatggggcggtgatgtgatcccgttggccgaggccttgtggtggctggacgtggccatgtccctggcctgcggcgtactgatcccgttcatgatgttcacccgccaggagcacagcatcgaccagatgaccgctgtctggctgttgcctgtagtggctgccgaagtggcggcggccagcggcggcttactcgcgccgcacctgttagacgcccattcgcaactggtgatgctggtgaccagctacgtgctgtgggcgttttccctgccggtggcgttcagcatactgaccatcctgatgctgcgcatggccttgcataagttgcctcacgccaatatggcagcgtcgagctggttggcgctgggccccatcggtaccggtgctctgggcatgttgttgctcggtacggatgcccctgcgatcttcgccgccaatggcctggccagtgtcggtgaaatggcccacggcctgggcctgattgcgggcatcaccctgtgggggttcggcttgtggtggatgttgattgcggtgttgatcaccctgcgctatctgcgtgccggtatcccgttcaacctgggctggtgggggttcaccttcccattgggggtttacgccctggccacgctgaaattggcgagcctgctgcagctggaatttttcagtgtgtttggcagtgtgctggtggttgcgctggcgctgatgtggctgatcgtggccaagcgcaccgtgcagggcgcttataaaggcgagctttttgtttcgccttgtattgccgggctagcgaataagtaagcagtattaggtaaagtcgtggcctgataaataaaggccacgcaggaacacggacgacgatgagccatccttcccaattcaccttgctgcgcacgcggcgcttcttgccgtttttcatcacccaattgctgggtgcgttcaacgacaacatcttcaagcagtcgctgatcctggccatcctttacaagctcaccatcgagggcgaccgctccatttgggtcaacctgtgcgccttgttgtttatcctgccgttcttcctgttctcggcgttggcggggcagtttggcgagaaattcaacaaggacgcgttgatccgcgcgatcaagatcggcgagatcgtgatcatggcggtgggcgcggcgggctttttgaccaatcatcttgagctgatgctgctggcgctgtttgccatgggcactcactcggcactgttcggcccggtgaagtactcgatcatgcctcaggcgttgcacgacgatgagttggtcggtggcaacggcctggtagagatgggcacgttcctggcgattctggccggcaccatcggcgccgggatcatgatgtcttccactcaatacgcgccggtggtggcggtggcgattgtggccgtggcggtgctgggctatttggccagccgcagcatcccgcgcgcggcggcgtcgacaccgcaactgcgcctggactggaatatcttcactcagtcgtgggcgacgttgcgcatgggcctggggcagacgccagcagtgtcgcgctcgattgtcggcaactcatggttctggtttgtgggtgcgatttacctcacgcaaatcccggcctatgccaaggaatggttgtacggcgacgaaaccgtggtgaccttgatcctaacggtgttctcggtgggcatcgccctgggctcgatgctgtgcgaaaagctctccgggcgtaaggtggaaattggtctggtgccgtttggttcgtttggcctgaccgtgttcggcctgctgctgtggtggcactccggcggcttcccgcagaacgtgcaacccaacgattggctcgcggtgctcagctacggccaggcgtggtgggtgctgctcgatatcctcggcctgggtgtgttcggcggcttttacatcgtgccgctgtatgcgctgatccagtcgcgcaccgccgagaacgagcgggcgcgggtgatcgcggccaacaacattctcaatgcactgttcatggtggtctcggccatcgtttcgatcctgctgttgagcgtggccaagctgtcgatccccgagctgttcctggtggtgtcgctgctcaacatcgcggttaacacttacatcttcaaaatcgtccccgagttcaccatgcgcttcatgatctggctgctcagccattccatgtaccgcgtggagcatcgcaacctgcaagccatcccggatgaaggcgcggcgttgctggtgtgcaaccatgtgtcgtttgtcgatgcgctgttgattggcggtgcagtacgtcggccgattcgctttgtcatgtactacaagatctaccgcttgccggtgctcaattttatcttccgcaccgccggggcgattccgattgccgggcgccatgaagacatccagatctacgaacaggcgttcgcgcgcattgcccagtacctcaaggatggcgagttggtgtgcatcttcccggaaggcaagctgacggccgatggcgagatgaatgagtttcgcggcggggtgacgcgcatcctggaggagacgccggtgccggtgatcccgatggcattgcaggggttgtgggggagtttcttcagccgcgatccgaacaagggttttttccatcggatctggtcgcgggtggtgttggtggcgggtgagccggtggccgtggagggggcgacgcctgagcagttgcaggctgtggtgggtggtttgcgggggagtgtcaggtagtttttcgttgtttgtcagcgcctcatcgcaggcaagccagctcccacatttgactgtattcacaattcaaactgtgggagctggcttgcctgcgatagcgatagtggcttatgtcgagatcttgaggccaatcaacccacaaataatcaacgccacactggccaaccgaaacagcgccatggactccccaaacaggataatcccggcaatcaccgtgcctacggcccccacgccggtccagatggcataggcggtacccagcggcagttccttcatggccagccccaatagcccaaggctgacggccatggcggcaatggtcagggcggtgggcagcggcttgctgaacccgtcggtgtacttcaggccgacggcccagcccacttcaaacaacccggcaaagaacagaatgatccaggacatgatgacctcgcttctatcaaagtggggtcgtccccgggtaagcgcttgatagcgtcgcgaggtcgtccccgcgaagttcggtagagtgccgaaattggaccgtgcgatcaagttacggcgtggtttccagcgcgcgacggtcttccttctcgctcatgcgccggaagtaggtcgacagcaacgctccggaaatattgtgccagacgctgaacaacgcgctgggcactgccgccagcggcgaaaagtgtgcactggccaaggcggcacccaacccggagttctgcatgcccacttccagggccagcgacttgcgttgcgccaggggcagcttgaacaggcgcccggtgaagtagcccaacaggtaaccgaagctgttgtgcaacatcaccacggccatgatcagcaggcccgactcggcaatcttgccttggcttgcggcaaccacggccgcgacgatgatcacaatgctgaccaccgacaccagtggcagcacgtccaccgcatgccttacccgatcaccgagcaagcgctgcgcgaccacgcccagtacgatgggtagcagcaccacttgcaggatcgaccagaacagctccatgaacgacaccggaagccaggccgaggccagcagccagatcaatgccggtgtgagcagcggagcgaggagggtggtgaccgcggcaatcgccaccgataacgccaggtcaccccgggccagccaggtcatgacattggacgacgtgccacttgggcaacagccgaccaggatcacgccaacggctatttccgctggcaaatggaacgcctggcacagcaaccatgccacgcccggcatgatcacgaaatgcgcgaccacgcccaaggccacgcgccaggggtggcgagcgacttcggcgaagtcttccagtttcaaggtcaaccccatgccgaacatcaccaggcccagcagtgggacgatggcgcttttcaggccaatgaaccagctgggttggagaaaggcgacaacggcaaagatcaacacccaataggcaaaggtgttgccgacgaagcggctcaaggcggcgagtgcgcgcatggggatgtccttttttattcgatttctgagttgtcaatgcaatcaagtgtgggagctggcttgcctgcgatagcggtgtatcagccagaatagtggcgactgatacaccgctatcgcaggcaagccagctcccacactgaccgtgcccacattggatcggtgttgcttagatgccctgtggtgtctcttcgccgcccagtgcctcaaccaacgccggcaggaactcgccgaaggtcagcatcatcaaggtaaagctggcatccagttggcccagggcttcatcaccgccgtcctgttccgcctggtcttgcagcaggtcttcgaacttcaggcgtttgacggtcatcttgtcgtcgagcatgaaggacaacttgtcctgccacgccagggacagttgggtcacgaccttgccggtggtcaggtgcaactggatctcttcgctggtcaggtcctggcgcttgcaacgcacgatgccgccgtcttcgtgggtgtcgcgcagttcgcattcgtcgaggacgaagaagtcgtcggccggtttctgggtggtgacccagtcggtcatgattgcagttggggcggtttttaccgtcagcgggcggaccggcagggtgccgatcacttcgcgcagggtcgacagcaggtcttcggcgcgcttggggctggccgagttgaccaggatcaggccctgtttcggcgcgatcgcagcgaaggtcgacgagcgacggataaaggcacggggcaggaaggcctggatgatttcatccttgatctggtcgcgctccttcttatagaccttgcgcatctgctcggcttcgatctcttcgactttctctttaagtgcatcacgcaccacgctacccggcaggatgcgttcttccttgcgggcggcaatcagcaagaaatcgccgctgacgtgaaccaggggagcatcttcacctttaccaaacggtgcgacgaaaccgtaagtagtcaactcctggcttgcacaagggcgcgccagcttggtggccatggccgcttccaacgcctcggcatcaacaggcagatcttgggtcaggcgatagataagcaggttcttgaaccacatggggtgagtctctcctctatacaaaggggggcattattctcttgatcacgccgcaggccaaccctgcctaagccattggaagggctgaaaaaaaagatttaagaaagtgcttgccagacttaaggtcgctccgtagaatgcgcgccacaccgaaacgaagggtgattagctcagctgggagagcgtctgccttacaagcagaatgtcggcggttcgatcccgtcatcacccaccattcgcttcatgtgttacgcgcagcggtagttcagtcggttagaataccggcctgtcacgccgggggtcgcgggttcgagtcccgtccgctgcgccatattcggtcacctggaacgctgaacgccaggtagccaaagaagcccgctcattgagcgggcttttttctgcccgaaatatggcaaaaaatcgtgcgctaaactttttttaaataaattgcatttaaatcaagacattacgattttttggtgtatgatgcgcccacaccgaaacgaagggtgattagctcagctgggagagcgtctgccttacaagcagaatgtcggcggttcgatcccgtcatcacccaccattcgcttcatgtgttacgcgcagcggtagttcagtcggttagaataccggcctgtcacgccgggggtcgcgggttcgagtcccgtccgctgcgccatattcggcaacttggaacactgaacgccaggtagccacaagaaacccgctcattgagcgggttttttttcgcctgcgatttaacgcgccttacggtgcgttgcggctgtggcggtaatcgctgacggcttcgtacaccgctttgcgcagccggttgatgccgccgatggggcggtgcgcttccaaaccgaaccaggggttgaacgactggttatcgcacgccaggttctgcgccggcgtgtcgaagtcctgagcgggaatcctgaccttggccacggtttcatacggcgcgtcgctttccttccattcgatgctggtgtcttctatgggcatgaacgcctgcgggttttgccgctggatctgtagcacaaaacacgcatctacacgatcggtggacagttgctggttgagcgcgctgcgcaggaagttgggcaggtcctcgttctgtttgggcagcacataatccgggcagctttgcgggtcgggcgcgacgcgaaacttggcgttggccgcgccaaacttgtagggcgacactgaaaagtaagtcgtctgcgtcgggctggccggtgcgggcgccagggttgccagggcgataaacaagtgacgcacttgccagctgcgcgggtcgagcttgggaaagaacgccaggaccttcttgccatccgcttgcgcaccgacgttctgcgcgtattccgcgacatcgctgacaaagaagttcggatggctgaacatcacgaaatcctgctcggtacgcgcttgctggtcggccatcagttgcttgcccggcacatccaacagcttgatcgccatgccgcgggcatcgcggatgctgtcgaattgcgggtaggcgttgccgttggacaggcgcattgtcgcctgccaggtcttgcctggttctgcgaacacgccctggcgcaaggccgggtcgagatctgccagaacgctgacctcggctttcacgcacccatgggccttggcatgggcatcacgcaggtagcgagtgccttcgcgatgctggtcaacgatgcgcacggcggtctggatgatgccttgggtcatcgtcgcttcacccggcgggatctgttccttcaccgacaccgggcccctgtgctgccaggcgaaccaggccgtggccaacacccaccccagcaggcccaggcccagtagccacagcagggttttacccacaaaggcgccaaggcgcagccagagacgagcaagcatggagcggtccttgttttgcgatcggataatcatggcagttgttgctccagagggccgcccagcactttgaggtattcgagcagcgcccagcgttcctgcggcagcaggccacggccgataacgccattgccacgctcgccggcacggaattcgtggccgctgttgtggttgccggtgattctggtatcgaacaggaaggcattcttgaaggcgatggtctcaaaccccaggtgacgcgggtcgtagttgaaggtgcctttatagaaggtggtgctgcgttcgtcctggggcgagagcagttggtagatcgtcggcaccgaaccgttgtgaaggaacggcggggtggcccatacgccggccagcggccgcgccttgtaggcacgcaactcgcgcacgccgatgggcaggccgaacccgtccaggcctgggcgctcggccggggtgacgccggccgcacggtaggcatgctcttcgacgaaggccgtgacataggccaggccctgggccaccgacatttttttcaggtccatcggcgcggtgggggtggggtgcagttcgacattgagccgggccagttcggccgggtcccattgcagggcactgaggtcgtagcgttggtcggcaatgttgttggccgtgccggggtcggtgccgatgtagtccaccggcagcattttcaactgctgcaccgggcggccgttttcttgggtaacggtgggcaggtggcagccggcgcagttctcggcaaagagtgtgcggccctgggcggcgagggatttgtcgatggccccgaacaagtcttgcggccaggtcggcggcttgagccgttgcagggtttcttcgatcaggtgcaggtcgcgcacccgtacgctggacgggtagcgggcatcgcctttgagcggttgcccggctgcgtcgaagaacgccagggtcgcgcctacgccaagggcttcgccgatgttgcgcgccatcggctgctgggccgagccattccactgcacccaatcgaaggtccagatgtcccacagctgcgggtagtccaccggcgcattggcgacgcgataattgtctggggaaatagcgtcgccaaaactggcgttggcgatgcgcccaaaggcatccgtacggcccgggccttcttcggtggggtaaaggccgcgatgggtgtcattccaggcgactttgaggaactggttcaacgattgcttgaagtccgtgcgcagttgatcgcgctgagcatcgtactgatcccccagcaccttgtgggcgaagcgctcgaacttccatgggttgtaataggtagcggccaggctggcgaccagggcctggccgaaactgccgccgcgcaacgtgggaacgctggagggcagcacgtgttgcgccgagccgccgtcgatgcgcagggcctggcccttgaagtgcaattcgccggtgtggcaggccgcacaggtgatatccaggtactgagccttgctgtcggcgttctggtgccgggcgaaccctaccggcaggttgccagggttttgcgcggtggccgtctgcttggggtcgaccaggaagccgaagcgcgccaggtattccggcgcggcaaagcgttgctcggagaacggcagctccagggcggtgaaccagtcgtagtgcaggccttttacttgggtgccctggggcgtgaagtagtaggtctggcggtcggcggcactccattgctcctggtagtgcacctgctttactggaacgtagtccggcagctttgggttgagggtgtagtagagcaccacggccagaatcaggcccagtgcgatcagtatcaggagtaaaacacgggaaaaaatgcgcaagataactatccttgtcgaattgtcgcgttgttatgccactgcgccacaggtgcggcaagtagcaattggcccgctatcaggcggtcccgcgatccgtcgcggggccccatgataaatggaaatgcttttaaacacgtgaacttatcagaagtttcctgctcacatgccggtagccattggtcgtggccgcctgataagctcgcgactttattcgaatgcccttatggcgcatgaacaaggaaatagcatgaaacagcatcggttggcggcggcggtggccctggttagcctggtacttgcgggttgtgattcgcagaccagcgtagagctgaaaaccccggcgcaaaaagcttcctacggcatcggcctgaacatgggcaagagccttgcccaagaaggcatggacgacctggactccaaagctgttgcccagggcatcgaagatgccgtaggcaagaaagagcagaagctcaaggacgatgagctggttgaagcgtttgccgcactgcaaaagcgtgctgaagaacgcatgaccaaaatgagcgaagagtcggcagccgctggcaagaaattcctcgaagacaacgccaagaaagacggtgtcgtcaccaccgcttccggcctgcagtacaagatcgtgaagaaggccgacggcgcccagcctaagccaaccgacgtggtgactgttcactacaccggcaagctcaccaacggcaccacctttgacagctccgtagatcgcggtagcccgatcgacctgccggtcagcggcgtgatcccgggttgggtcgaaggcctgcaactgatgcacgtgggcgagaaggttgagctgtacatcccgtccgacctggcctacggcgcccagagcccgagcccggcgatcccagcgaactccgtgctggtattcgacctggaactgctgggcatcaaggacccagccaaggcagaagcggctgacgcacctgctgcaccagccgccaagaagtaatcggcgcctgaacatacaacgccccgtctcgacggggcgttgttgttttcggcgttggtcaaacgacgcaaaattccctgtgggagcgggcttgctcgcgaaagcggcttggcagtcaacacagttggatggtgtacatgcaaaagtaagcaaaacgctcttgccccaccactcggcacctcgcctaggctcggtgtgcccgtaatccgccagtgatttggggcggctaaaccggcatccctgccggtttaccccccaaacccctgtcgaattccggccagcgtggtttaacggggcgccaaagatcaagatcacaagcagatcaagagcggctcgcttcgcatcgtggttagcgttggctgctatagcctgtagtgttgtgtagagacttatggcaatcgcaggcaagccagcccctacgttgaagcctctgcaaatccaaacgaacgtccgcaatcggacacagtctgatataagactcgagcacgggtagccgcacatacatgccaagtcaatgaattcttgggttttttttatgtgcgcaaaaaacgcccgatctgactgtaggccttgtagtccgtggctttcagccgataaaacaggctctgttcacaaggttatccacaatttgtgtggataaccttttatgtcgcctggaactggagtgccctatgaaaccaccgttcaatttcacccgtttcctgcctatggccgcgcgcttgctcggtcgtgggcgtttgccaaccttgctgtttgccgtcgctgccaaaggctcaagccagggcaatcggctcggccagctcaaggatgatctcaagttgctgcaggccctgtgcctggcttactggcgcggcgaataccgtgcgatcagccctaaggcgttgatctcggtggtggcggggctgatgtattttcttagcccgattgatgcgattccggattttcttcccatgttcggcatgctcgacgacatcgccgtgctggcgtgggtcatgaagaccctgagcggcgagctgagcgcctttcgtacctggcgcgatgcgcaacgtccggaaaaacttgcggtggttgagcgcctgcctgcgacgcctgagctgttggcccgggaaaacccgcaaaaaaactaatgatgcctggtatcccccggcgaccttcgtggctgttaggattacactcttaaggaaataacttacttagtaagtgtttttatcctacggggcagtcatggatatccagatcatttcacgcgatggcgaacccgagtatgcggtgttgccatgggaccagtaccaggcgctgctaaaagccgccggtcagttgcaaccgccacgcgcttctccttctgttgcacccaccgcctccgagcaggacctgcgcccgcttgcagccctgcgcggcctgcgtgaggccaagggcctggcaatcgaggccctggcgcgtaccgtgggcatcagcccttcgtatcttggattgatagaaagtggtgaacgccagccggatgccgccattcgccgcagcctggcctgggaattgggcgttgcaggttggagggatgagtattgagcctacgtatcagccgtcaacactgggatgggttaatcaatgaactggaccaggcacgtcgccagcgccatttgctgacgtatcgtgcgctgctggagcgcctgcaattccccacgccggccatgcagaccctggctgcggccctggagcacctggcggcgctggatgccaaggcggagcaaccgctgcgcagttccctggtgatcagccagggcgcgagccgcctgccacgcaccggtttttttgagtgtgtggagcgcctggggcggttcagcgggccttccgatggtgtggccgctgcgtcctggcatgcatccgaagtggtgcgggtgttcgagtacgagtacccggaatctgccgaggcctaaagcgcctgggagcaggtgtccatgctgtcgatcacgtggatgctgtagcccgcaacatccttggcatggtgcttggcttgtgaagccagctctgccaattggctggcatcgagttgcgcacaggcctgtggatacaaatgcaccacgccgatggacagcgacagcaatgcaaattcctggcgcgcgccctggcggttgagggccacgaagcacccagcctcaaggtgttcagcgcggtagaagcgccggcattgggtgtggaaatcgtccagcaattggttgagccgcttgcgccaatcctgcgggcccaacaccagcagaaagtcatcgccgccaatgtgcccgacaaagtcgcggctggggtctacccgatcgttcaagcactgcgccaggcacagcagcacttcatccccgcgcccgtagccgtagatatcgttgaacggcttgaaactgtcgatatccacatagcagatcaccgactcgcgctgttgctgcaacagcctagtgaggcactgctggatcggcacgttgccaggcagcaaggtcagcgggttggcgtagcgggcctgctggattttcagttcggtgatcaatttgagcacgtcgataacccggcccagccccagataatcaccgttcagggtgatgatgaaatcctcttcgatgcgttgtcgtgcgcggctggtcaataagcggctgacctgctgcaaggactggctcagttccaccgccaaaaaatcatcgctcatcaagcggctgatgggtttgcgcgcgaacaagtcggtcgcgaatggcttgagcagcgcgtccgatagcgaatgccggtgcacaatgccgaccgggcgaccgcagccgtccaacaccgccagcgagttgaggttggcctggcggcggaacgattccagcacttgggcggtggcggtgtcttgatccacggcgggctgctcattgagcagggcgctcaggtcactgccttcatcattgagggccagcatggcgttatccggtttgggcagcatcaggcgcgcttcctgcgggggctgttcctgagggcggcagagcaggtagccctggaccaggtcgacgcccatttcggtcaataccgccagttcttccggcaactcgatgccttcggcaatcacttgggcgcgggacgccttggcgatctgcaggatggagccgacaaactcgcgcttgagggcgtcctggtgaatgccgtcgataaaatgccggtcgatcttcacgtagtccgggcgcagttccgaccacaagcgcaagctggaataaccggcgcccaggtcatcgagtgcgatggcaaaacccatgtcgcggtagtggtgcaaggcggtttgcaacagcgcgaaatcgtcggtgggcgcctgctcggtgagttcgatcaccacctggctgggagaaataccgaagtcgcgcaacagttgcagggtgcgccctggctgatgcgcgtgctccatcaacgattccggcgagatattgaggaacagcttgcccggcagtttctgctcgctgaagcgtcggcatgcacgctctcggcacgccatgtccagctcgctcaggcgcccggcatggctggccaccgagaacagcgcgacgggggagtgcagcgggctgttggacgggccgcgactgagggcttcgtaaccgaggatgcgccgctctgacaggcagatgatcggttggaacaggctgtgcaaactgccttgagccaggattgagcccaatgcattcagctgttcggtcatggtcatggcggtctcgatcaaaaaaaaggaccgcaggcgtaaacctgcggtccttttatttcacgacagaatgatgtctatatgatgacactccgaggagcgatcacattaaatcgccatcatttactgcttggccacctgcttggtgatcttcaggtaatccagcaggatccggccagtctcggccaagtaggcgtcgtcttccggcttggttttatccgcctcggtcggcagcgcgtcttcatcttctttcttcagctctttgagcgggtcttcacctttggccttacggcgggtgttttccagcaccagttgctgattctcgatgctggagtgctgtgcacggcgatccgcttcgttgaggctgacggtcttctcttccatcagcttcttggccagggccagcttgtcgcggataaacacgaactcggcatccttggcagagcgggtgtcgtggtcagccttcagctgtgccaggaacggcttgaacggatccgacgccggcttgatcgcagggcggatggtgtcccacggcatggcttcaggcagggcgctttcgccaatttccttggtgtcgatgatcgacgggaaatcgatatccggcagtacgccctgatgctgggtgctctgcccggagacccggtagaacttggccagtgtcagcttaagctcgccatggttcagcggctggatggtctgcacggtgcctttgccgaaggtctggccgccgatgatcagtgcacggtggtagtcctgcatggcaccggcgaaaatctccgaggccgaggccgagaggcggttgaccagcagcgccatcggccctttgtagaaggcccccgggttctcgtcttcgagcacgtcgacacggccgtcagcgttgcgtaccaacacggtcgggcccttgtcgataaacaggctggtcagctcggtggcttcctgcagggagccgccgccgttgttgcgcaggtcgatgaccacgccgtcgactttctctttctgcagttctgtgaggattttcttcacgtcgcgggtggtggacttgtagtccggatcaccggcacggaacgccttgaagtccaggtagaaggccgggatttcaatcacccccagcttgtagtccttgccatcctgcttgaggttgaggactttcttctgcacggcctggtcttcgagcttcaccgcttcacgggtgatggacacgatcttgctggtctggtcgttcggtgcattggtgtgcggaatcacttccaggcgcaccacgctgcctttaggcccacggatcagcttgaccacttcgtccaggcgccagccgaccacatcgaccatctctttgtcggcctgggccacgccgatgatcttgtcggccggtgccacttgcttggttttgtcagccgggcctgccggcaccagacgtacaatcttcacctggtcattgtcgctttgcaggacggcaccgatgccttccagggacagactcatattgatatcgaaattttccgcgttatctggcgacagataattggtgtgcgggtcgtaggacatcgcaaaggtgttgatgtaggcctggaagatatcctcggcacgggtctggtccaggcgcgccagctggtttttgtagcgcttggtcaacagctcttgaatggccttgggctctttgccggcgatcttcaagcgcagcacttcgtccttgacgcgtttgcgccacaggtcgtccagggctgcggtgctggtcagccaaggggcgtccttgcggtccaccagaagggtttctttctgggtgaaatcgagcttgtcgacgcctttgttcagctcacccagggcgaagtccagacgcgctttgacgcggtccaggtagcgcttgtagatggtgaagccaggctgcaggtcgccgctcttgaggaagtcgtcgaattgcgtcttccacttgtcgaactcagcgatatcgctggccaggaagtagctgcgcgacgggtccagcagcttgaggtagctgtcgtagatgatcactgagcgagcgtcgtccagcggcggcttgctgtagtgatggcgcttgagcaactcgacgacgttaaggctggcaatcacctcatcgcgatcaggctgaaggttgtcccagctattggctgcgaacgtattggtcgacatcgacgcgaagccgagaccaatgaaaaaagcgagggcggtgctggggaacagatgcttcatgctgattcgacgcgggggcaattgataacgcatattaggccgtctttgagggagccggttccatatggtccggtcgcataatgcaaaaagcccggcgctacagcaccgggctcagtccagactcactatggaggcactgtgaaagcattgcaaggcgttgacggtgatgtggggggctagaacaaccccgtcctacgttcggtgtagtccatattgccaatagcctggccgaaacctagattgaaatgcagtcagtgtgggagctggcgtgcctgcgatagcggtgtaccagatgaagaattcttcactgttgcaccgctatcgcaggcaagccagctcccacaggttgatctctattgagtcaggtccagtgatggaccggccagccggccttttcggcatgggcgcgcaacaccggatccgggttcactgcctgcgggtgatccaccttgagtagcagcggcaagtcattgcgcgagtccgaatagaaataggcaccttcaagggtttcgccttcctgcgccagccattccaccaagcgcgtgatcttgccctcacgataggtcagcacgcctacggtcttaccgctgtacacgccgtggctgacttctaggttgatccccagcacttcctcaatgccgatacgcgccgcaatcggcgtgaccaggtgagtgcccgacgcggaaatcaccaggatccggtcgccgttcgcgcggtggcgggcgatggtcttggtggcgtcgctgtagatcagcggctcgatcacgtcctcgacccacggctccaccaggtgctcgatttcttccggagtgcggccgatcatcggctccaggctgaaatccatgaaatcttccatccgcagctggccctggctgtaggcgtccatcagctcgttgttccggcgcatgaacgactcagggtctacccagccgaggcggcccatctgttcgctccacagcgtggcgcagtcgccgtgaatcagggtgtcgtccagatcaaaaattaccaatgccatccttcatgctctctctcaataggtcgctgcctgtcaggctacttcacacagtgcgctggggtcgatggaaagtgccaggcgctggccatccgggtgcaggtcgtcggccgaacgattgagtacgtccaccaccagctcgacaccgcgggcttcgatgcggtagcgaatcacgttacccagcaggctgtggctacgcaccagcgcatcgagctcgccgctgcggctcaactcgatggcttcggggcgaatcgcgatgcgcccgctgatcggccgttgcagcagttggctggccttgtcggcatcgagcaggttgtagttgccgataaacccggcagcgaacgcatccaccggcgcggtatagagggtttcggcatcgccgctctgcacgatcttgccctggttcatcaagaagatgcggtcggacatggtcagggcttcttcctggtcgtgggtcacgaagatcgtggtcaaccccagttcgcgctggatctggcggatctgttcgcgcaaatgcttgcgaatccgtgcatccaatgccgacagcggttcatcgagcagcagcaggcgcgggcgggtcaccagggagcgggcgagggcgacgcgctggcactggccaccggacatctggtgcgggtagcggccggccaggtccttgagctccaccagttgcagcacttcttgtacgcgcttgtggctgtcgtcggcgttgactttctgcatgcgcaggccgaaggcaacgttctgctctacggtcatgttggggaacagcgcgtagctctggaacaccatgccgatctggcgtttctgcgggctcaggggcacgatgtcctggccatccaggaggatttggccactgtccaccggggtaagcccggcgatacagcgcagcagggtggatttgccgcaaccggacgggccgagcagggtgacgaactcgcctttggcgatctcgcaattgatatcgctgaacaccggggtgccggtgtagcctttttgcaggtgttggacgctgacgaagctcattggcttttgtccttgttcaagagcgtggcggcccaggtgagcaccagcacaaagaagaaataggagatcaccacggcactggtgaaatggccgctgctgttgcgcatgttgttgaggtacacctgcagggtttcgtagcgggtgccgacgaggatgttggcgaacacgaactcgccgaacaggaacgagaacgacagcagcagcgccaccatcaggcccttgcgcaggttgggcagcaccaccaggatcgcggcctgccaggtgctggcgccgagcagttgcgaagcgtccatcaggtcgcgcaggttgatggcttgcaggttgttggtgatcgcgcggtacatgaacggcagcgcgacggtgaagtagcagccgatcaaaatccacggcgtgcccaccatcgccagcggcccggacccgtacagttgcagcagacccaccgaggacaccaccggcggcaccgcgaagggcagcaggatgaggatgttcatcagcgcgtcgagcttgggaaagtggtaatgcaccacgaacagcagcggcaaaatcaacaccaccgaaaggatcagtgcgcccacgcacaccagcaacgattgcccgaaggccatcagaaaacgcgggtcgctccacagctgtacataccacttcacgctgaagccggcgggaaggatggttgccgaccaactgctggaaatcgagtagacaaaggtgcctaccaaaggcagcaccaggatcaggaacaacaggtacaccaccacccgatggtagagggaggccgggccggcttcagcgcgagacatggtagctcctcttgagcagcaattgatgcaccaccgtgaccacggtcatcagcgccaccagcaccacggccagggcactggccatgttcgggtccaacgacacatcgccggacaccaggcccgcaatgcgaatcggcagcacgttgaagttgccggtagtaagcgcatagaccgtggcgtaggcgccgagggcgttggccagcaggatcacaaaggtaccgagcagggccggggtgagcaccggcaggccgatatgccgccagaactgccagccattcgcgccgagcagggcggccgactcgcgccagtcttcgcgcagtgcgtcgaaggccgggtagagcagcagcacgccgaggggaatctggaagtaggtatacaggatgatcaagccggtcttcgagtacaggttgaagtcttctatgatcccggcctgcttgagcatgagggtgatgctgccgttgaaccccagcaggatgataaacgcgaaggccaggggtacgccggcgaagttgctggtcatgttggcgaacgcggtgacaaagttgcgcagcggcgaatccactcggcgcagtgaatagctacccagggtggcgatgatgatgccgaagatgctggagtagaaactgatctccaggctgaactggatcgcctgccggtagaacttcgaggtgaagatgcgggtgaagttttccaggctccagccggcctcttcggtttgcaggctgctgatcagcacccacaccagcggcgcgatttcgaacacgataaagaacagtgcgaagggcagcaggcatagcagggccagccatttgccgcgggtcaatgcattcacttgagcaactcccggcacacaggtttgtcgtggggcacgcccagcagttcgcagaccgtgccgcacaggtcggtctgtttcggcgcagcgtcagtgtccaggctgaaggcgtcacccaggacaaacagcggcacttctcgttcttcgcgcaacaggccgttgtgggagcggtcgttgttcatgccgtggtcagcggtgaccagtacctggtagccggcatcgagccagccttgcaggtagtcggccaggatgatgtccgccgagcgtgcgctgttgcggtattgcgcggtgtcgaggccgtgcttgtggccggcatcgtcgatgttcatcgggtgcaccagcaaaaagtttggcgcgtgcttgatccgcaggctttccgcatcggcgaacaggtgggaatcagggtagtggtcattccagtagaaatgcccatgctggatcgccagcgcctggtcgtcggtgtgacgatcgcgggcggcgagaaagggcgtgcggttatacaactcgctgacccaatggtaagccgccgccgcggtgctcaagcctgcgtcggtggcgtagtggaaaatgctgcgctggttggacaggcgcgagacgttgttgtgtacgataccgctttgaatcggcggcacgccggtgaggatgcactcgtacagcgggcgggacagggcaggcagttcacattccagtgtgtaaagggctgcgcgtcctgcgccgacataggcctgcaagtgccccatggcgtgccgggcgacctcgaagttgaggccgtcgagcaccacaaggatgacattgtgcttcatgggggactggggctccgcaacaagatggtatggctcagtatcaacttggaatggaatcaaatgtgggagctggcttgcctgcgatggcggtgtatcagtggacacaaatattgagtgtcagaccgctatcgcaggaaagccagctcccacactgaccgcacctcgatcagagagaccgattacttcatttctacgatgacctgctcgttccacatctgtggcagcttcttggaagtcgcttcccaggcatcggcatccttgatcggctgcgggttggccttggtgtactgctcgcccgggatcaggttcttggcaacgtccgccggcagtttcaagtcggtttcagcgcggatcggacgcgcgttgccacgtgccaggttgagctggccggcatcgctgaagatgtattcgcgggtcagcttggcggcgttcgggtgcttggcgtatttgttgatgatggtggtgtagccggatttcaccgagccatccgaggggatcagcaccacgtagtcatccgggttggccatcttggccttgtagctcaggccgttgaagtcccagacgagacccacttcgacttcgcctttttccatggtggcgatggtcgggttggacagtgagaggcgaccctgctgggcgatcttggtgaaaaattgcaggcccggcgcgatgtttttctcgtcgcctttgttggcgatggccgcggcgagtactgcgttcgaagcctgggcggcggtgctcacgtcacccaccgataccttgtacttgccggtttgcaggtcagcccaggtggtaggcacttcggagccgtgcagcagtttcttgttgacgataaaggcaatggtgccggtgtaggccagggcccagtgaccgtctttgtctttcgcccaatccggcacctgggcccaggtagacggtttgtacggctgggtgacttcctgcttcaccgcgatcgggccgaaggccgcgcccacgtcaccaatatccgcgctggcgttgtctttttcggctttgaacttggcgatttcctgggccgagctcatgtcggtgtcgatgtgcttgaggccgtaggttttggccaggtcttcccaggtgcctttccagttggcccagtcatcgggcatgccgacgctgttgacggcgccctccgctttggcggcggcttccaaggtttttagatcggtatcagcagccatggcggcggtgcacatggcaatggtcgagcctaacagtgatgccaggaaaagctgtttcatccgaagctcctttgggcgttttcaacgcggcgttttatctgaacgttagcggtggtttggtctaggtcagcaatacctgagccaatctaggccccctggatgacagtttcatgtcgatgtcgtttttgaagcgctgatgtcgttcagctccgacttagcgtagaccatgcccaagtggccgcaggccttggacttggccgatgtattgcagggtgtggaagacgcagtcgacagcctttgtcatctgtcggtcatctggagtgcctaggctggcacccagcagcaaaagcccagatagagcgcgttttgtgcacctgaacggtgctggtctagtccagataggtaacgttgatgcgtgatgaggcaatcaaggcggtaacttccatcggcctggcgctgcaagagcagatcgaccatggcctgttgccgcctgccagcaaactgcccgccgaacgcaagctcagcgagttgtttggtaccactcggattaccgtgcgggaagccttgttacaactggaagcccaagggcagatctaccgcgaagagcgtcggggatggttcgtctcgccgccacggctggcctataacctgatgcagcgcagccactttcacgcgatggtcagcgatcaggggcgtgaggcttccacgcaggtcatttccgcacgcttgcaaccggcgtctgcggcggtgtgcgcttggttgcaattgccggcgttgtcgagcgtgatccagatttgccggggccgcaggattgacggacgcctggtgttgtacgtggagcactacctgaacccgcagtattttccggggatcctggcgtgcgatttgaatcagtcgatgactgagctgtatgcgcgcaaatatgacttgcactacgggcgggtgcgtttcgaaattgtgcccacctcactgccggtggaagcggccgctgcgctgcgtgtctcggtgggtagcccgggcttgcgcatcgcccgggtgaactacgaccagcatcaacgcctgatcgactgtgacctggagttctggcggcatgatgcgattcatgtgggggtggatgtggtgtagcggctgatgcaccgcgatccaatgtaggagctggcttgcctgcgatggcatcgactcggtatgcctgataaaccgaggcgcccgcatcgcaggcaagccagctcccacattgaaccgagtttatcgctgacggatcggtggctcgcctagggcgtaagtgccttgatcacttggtccacattggtttccaactccgtcaccgggtcggcaccgtccacattcaataccaatagtctggagccgccggcatttacggcggctttgaccgcatcactcggttgacggtgatgcagcaccaccgccacgtcgttgtccttcaactcggcgctgagtttctgcagcgcctcaggcgtccactcggcgtcgggccgtgcatcggtgctgagcacttccaggttcaggctgctgaccaggtacgcgaagtgatcgctcaagctgaccacactcaggttgtcggccttggccaatcgcgcttcgctgtcggcggtgagcttgagcaaacgctgtttgagcgcggccaggttggcgtcgatcctgggtttggctgccggggccaggcggcccaggtcggcggccattacgtcggccatgcgccccatattgttgctcgattgccagggttggctgttcaagccatcggtgacccccggttgtactgcgatacccggcaagccaccgtccaccgggcgtgcggcatcgacttcgacgatgcggatattgctgcgccgtgccacggggtacagcgggtcatcggcccacagcgagcgcaggccgatggccgcgtcggcgtccagcgccaacttgttcaatgccgcagcaccgcggccggtgaagtaggacacctgccgcgagccgggtaaattggccggcgcggcgcgttcaagcgctacgttggtgcctttgagcagcgcttcggccagaccataggtaatcggcagcgaggccagcaccttgaccggcggcttggtcttggtcagggctgcgtgaccgaggccctggttgactttgaagtccttggcgtcgaaaccgtcgacggccagcgccgacgtactcatcaagcaagcgatggccaaggccagtgggcgaaaggcagggcgcattatccaagattccctttgaggctgggcacaacgccacgggcgatggcggcgaaggcgaaggcgatcccggcaaccagaatgatggcggcgccggaggggatgggcaggtcaaagatgatcggcagcaggatgccgcacagggtgctgacggtagcgatcagcaccgagatccagaaaaaccctttgagtgactggctcaacaggcgcgccgccgcggcaggaatcaccagcaaggcaccgaccaggattgcgccgatgaccttgaccgcagccacggtgatcagggtcaccaggatcacgaacaagtagtccaggcttttcaccgccaccccgcgcactgccgccaattgcgggttgaaactggccagcatgatgcggttgtacagtggcaatgccagggccatcaccagcgagccgacaatggccagtaccagcaggtcgttgccgttgaccgtcagcaccgagccaaacagcacgttctcgagaatgtgcacgttgatcttgccggccaggatcagcagcaggcttgcccccagtgccagggacaccgacaggaacacgccgatcaaggtgtcgggcgccaggccggtgcggttacgcaggtaattgagcaggatgccgaacagcaggcagtagccaaacaggctgccatagggccccgtatagggttcgcccagcaggatgcccacggccacgccggtcagtgcggcatggccgaccgcttcggagaaaaacgcaaagcgcttgaccaccaccagcgtccccaggccgccgagtaccgggccgatcaacaagccggcgagcagggcgttgaccacaaaaccgtaggccagggcttcgggcaggtaaccggaagaggcccagccctggaccatcaagcgaaaggcttcataattcatggcgccgggctccgagggtgggtggagaacagagtgagcaggcggtccggggtcagcgcctctttgggtgtggcgtcgaacagcacgcggcggttcagaccggtgacgcgatccgccaggcggcccacggcctccaggtcgtgctcgatccacagcaccgtaatcccggccaggcgccagtcgttcagcagccgttcgaacacttggatacccgcctcgtcgagggccgacatcggctcgtccagcaccagcaactgcggcgcaggaatcagcccctgggccagcagtacgcgctggcgctcaccgccggacaacgcgcccatgcggcgcttgcgcttgtcttgcatgccgacgcgctcgagggcatcgccaatcgccgccgcgtaatgcctggacaggcccagaaacgccgggcgacgctggcacatggcagccatgaaatcgtccacggtcatcggcaggccccgatcaaattccagcgcctggggcacgtaaccgacggtgccgggtgtggttggccactccaggctcaagcgcccctggtgcggcgtttgccccagcagggtcttgatcagcgagcttttgccgccgccattggggccgaccagcgcatggatgctgcccggctgtacctggaagctcacgccatcgagaatcacggtgcgccccagggtcagcgagacctggtcgaagttcagggtcgggccgacgctggcggcgttcagttgctgcgcggcggtcatgctcccgactcctgaatcgcgcggaccacggtgttgaggttgccggtcatctccacttcgtacttctcggcgctgtattcgccgtaggaaatatgcgacagcgggtacagcttgactccagattcacgctggatggtatcgacgtaggtggacgggaagtccatctccgagaagatcactttcacatccagggcgcgcagttcatcgatggtctttttcagctggctggggcttggctcgataccgtgggccggctcgaccacggcggtgacttccaggccaaactcgcgcaacaggtagtcataggccgcgtgcacagtggcgacgcgcaggtccgggttgggcgcgctggtcagcttggccagggcgtcggcgcgcatctggcgcaggcgcttgccataggcgcgggcgttctgggtgtaggttttggcgttgtccgggtcgagcttgcccaactcacgggcaatgttattgacttgggcaatcgacgcgctgatcgacaggaaggtgtgcgggttgaccaccttgcccgcaccgcgtgccgcgttaccggtggcggcgagcaacggcacgttggcgtttgcttcgatcaccttgatgtccgggcgctcgctggtggcgatcatgcggtcggcgaagtcgtcatggccgacgccgttgagcacgatgacatccagggtgccgatgcgcttgatgtcttcggcgcgcggctcgtaggcgtgggggttgaaaccggcgggaatcagcggcaccacttcggccttgtcgcccacgatattggttacatagctgtaataggggtgcaaggtaatgccgatacgcaggcgcttggccgcctcggcgttggcaaggggggcgagcatcaggctgaacaggccaaccattaacaggcgtaacaggggcgatgacatagacatgggcaatcggtcttctcgttcagtgacggtgctggcgggtgacgccggcatcgaattgcgcgaccacctgctgccagccggccgcgatcagcgcttggtcagtgaggtcggacggggcggcaaggttggcgctgcggttgagccagatatccggctcgctgccttgcacgcgcatcagcagcgaaccgctggtggccggcgcctggctcaaacccaggtaggcggcgggtgccagcaactcccagcgatggccaccacggctgaccgagctggcgtcctgggcaaacggcgcgaagccttcttcggccagttgctcaggcgtcggcagggcgctgtgctcctgctgcaacaggtggatttcatccagggtcacccgcaggtcggcgtagatgccttgctcggccgcgctcaggtcgcggcgggcgtccagctggtggcttggtaccgccgcgacttcctgggtttccccgtgcagcgccacgaccgtgcccgccaccgcgaggatgatcagacacaacagcagcacataaagggtttcgtggcccgccccggcggggcgtacaacctgtgtggtactcattgcgacgggatatccgcttggtcgatttccaccacgtggccggggccggcatcgaacagcacgtagaactcggcggtgggcttcttgaaggtcagggtcgaatcctcgccgagcttgcccggcaccaggatggtttcgtcgtagccgatcacatccagggttacgccgggggcgccactgccgtcggaaaaaccgcctttgcactggatctgctcgccggggatttccttgcattcgcacatcgggttatgggcgaaggcggtggtgctcaggccggcgcacagcaacagcgcggcgcgggtgaggcgcttgaacatcatggtttgactccttgcttgttcagccaggcaatggtggcaggcgaggcctggctcagcgggatggaaccctggtgcatgcttccgtcccagccttccatggtcacccatatttcggcgtccgccggggtgcgttcggggattggcagggcggcgcccatgcgatacggcgtgccgaagaagatcactccggcggcgcgcaggctgcggggtttgccgatacgcaggtaagtggccttgacctgctcggcgcaggtgtcgcacagggctgcgttgaagaacttcatcgggccagccggatccgggctcgggccttcgttgcgaaactcagccagcgtcaggctccagggcccgacttgcacttgcccggccacgcgttcgccgatgccggtatccccgcgaaacagcgcggcgtcggcaaagtacttgggcatgaaccccaacggcaccagcaacagcaggatgttgatatggaaacgccatttcagccagaaggcgcgcagcggggacggcggtacggtcgcgaccttgctcatcgctgggcctccgaggtttcggcgtgcatggccgggatgggcgcggtttgacgttgcgtcttggcctcgcgcttgagggcgttgagggtggccagggcagtgcgcttggtccagatcagcaggccgctcaataccatcatgctcagcaccaggccgaagaacgcccagatcagcttgatccacaaaccgccaaagtccccggtgtgcagcgggcgcatcgactcggtgacgaactccagcggggtgcggtcggacaataagttcgagagcgcgatttcaccgtcataggggttcagttgtgcggtctggaacatcaacgggtaccagccacgcccgccgatctgcaggtggctgtaggcgttgcttggcatgaacacaaagctggcgtccaggccggggattttctcggcggcgatgtcgatcgccttgtcgatggggatcatcggtgccggtacgcccggtgccgacaacggcaccttttcccgcgcaatcactggcacgatgggttcgctggaaatggatatctggttgtcgcccaggacagcctcgatcaggaaccaggtgccggtgattgaaatgaccgcgataaaccagatcgaccagatgccgctcagacggtgaaagtcgccccagaagattctcgcgccgtggcggatgcgcagggtagggcgcaggaagcctttccagaagcgcttgtacacaaccagcccggtgaccagcgaagcgagcagcggcaagcccaacgcagacaccaggtaccagccccagctgtacccattggtgaacggcaccagccaccaaccatgcagggcgcgggtgaattgctggaagttgaacgaggggctgatgccctggatcgcgccggtataggggttggcatacacctccacggagcgcccatccgggtagctgaggccaacgcttagcgcgaagtgcgattcatccgggcggatgatggactggacaatagccttgggttcatcgcgctttatggccgcgatcacctggtcaaagctcagcggctgggcatcatccgacggcttgctggcgcggatatccgggttggccagccacacgatttcctggctcaccacggccagggtgccggtgacgcagacgatcagtacaaagaaccagatgggcaatgccagccagctatggacgagaaaccagagtttggagcgtgacttcttcgacatatgaatgggggtcttgatcggagggggcgatagaggcccggaaaaggccagtcgtagcttttgctgacgcgacaggctgtatctaagttaagacggatgagaatgagaaatccctaagggggatatgaaagaaaatgtttcaggatcgctttcagggtgtgtggcgtaacctttgagacatagctgcctgccagccgacgcctttctatctgacgcgctgaggtctaaatgtgggagctggcttgcctgcgatggcggtggttcagttgcagattaattgactgacccgtcgccatcgcgggcaagcccgctcccacaggggattgatgccgggcgctgattgcgctgcaactatccgccttgcttgaacatttgcatggcacgctggcggatctgttcctcgctcaggtcttccttgtgagtcgccaggaaccacaggtgcccgaacggatccttcacactcgccgagcgatccccatagaactgatcctgcggcttggataacacgctggcgccggcatcaattgcctgtttgaattgttcgtccacgtcattcacatacaggtgcaggccgacactgggatgtgcgtcgggattgcgcagggccgtttcgtcgcagggcgtgcccagcatgatcaccgcttcgccaatgcgcagttccgcatggccgaccctgccgtcaggcatgtccaggcgcatgaacactgaggcgccaaaggccttcttgtagaactcgattgcctttgcggcctcgttgatgcccagatagggggtaatgccctgataaccctcgggaatagctttaacgctcataacgttctccttgagtcgaggtacgagcatttcactataggccacgtaatgcgtggtctgcgggcaaccgacgaggtgcttttatcaaggctgtgtggtgggctccagcaactgggcgcctggcccatactcagcgagcttatcgtcctgattgcgcaacgggcacgcctccatcgacaagcacccgcaaccgatgcagccattgagcttgtcgcgtagcagcatcagcttgttgatgcgctcatccaggtcttcacgccacaacgccgacaggcgctcccagtcttgagcattgggtgtgcgcccatcgggcaaggcctgcaatgcctcgccaatgttggccagcggaatgcccaagcgctgggcgatcttgatcagcaccacgcgccgcagcacatcacgtggataacgccgctggttaccggcattgcgattactcttgatcagccctttggcctcgtagaagtgcagggcggtcaccgccacgccgctgcgggctgcgagctgaccgacgctgagttccttagtgagcatgaacctctcccaaacagtgcttgacctcgacttaactagaggttttaccctgcgtggcatcgaatcgcaagattctgcctacagagagaggggagttttcatgccggtatcagagaagagtcgcagcttcactcaactgatcgaatttcacatcgaaccccgtcagcaatccgccctggtggccgccttggccacccagagcgagcgtctggccgtgcgccatggcggcttcttgagtgccagcgtacaggtcagcgatgacgggcgcagggtgctcaattatttgcaatggcagtcgcgcgaggagggtgaggccgcctttaaatgttttgagcaaggcggcgaagatttctggacgctgatccgtgctcaccgggccacggccgtgacctttggcgcattccaggtactgcgcagttttgagcgcaatcaggacgatgccttgcactgccgactaaatggataggtgcagcatccgttcgccttgcacattttccccgggcctgcgcttgcttaccgccagttcgccgatcttgatcaggcgagcgcgagcgacgttgcggctcagtcccagcaagttggcggtgtgcacttggttgtggtggctgaagtgataagcagcgcgcaataaagcgtcctcgaccttttcatgcagggcgccggcctgttcctcgaagagcttttgaaacgcccgcgccagcagggcttctgcactgggatcggtgtcgttgtcgttctggcgttcgatgcgcaggcccgacaggcgcaggtcgtcgggttcgatcacagcgttgcggcagatcagcagggtgtgatgaatcacgttctccagctcacggatattgcccggccagctgtagcgcttgagcttatgctcggccaggtggctcacgctgatcgggccgtaacccaggcgctggctgtaggtttggatgaagtgccgggtcagtggcaggatatcgccggtacgttcgcgcagcgggctcaatgccaggctgactacattgaggcggtagtagaggtcttcacggaaacgcccaacattgatggccttttccagttgtacattggtggccgccaggactcgcacatcgatagcaatgcgcttgcgcgaacccaggcgcaccacctctcgctcctgtagcacccgcagcagcttgacctggatggccatcggcaaatcgccgatctcatctagaaacaaggtgccgccgtcagcctcttcgaaccagccggccttggcgctgagggcaccggtaaaggcgcctttctcatggccgaacaactcggcttccaccagggattgcgaaaaggccccgcagttcaccgccacgaagggccggtttcgccgcgcactgaggtggtggatatgccgtgcaacaagttctttgccggtgccggtttcgccaatgatcagcacgctggcttcgctgggggccacttgctggatatggtcgagcagggcctgggactttgggtcttcgaaaacctgggctgtggcgcggatcgaggtggctagggcaggcgagggcggcagggtgaacagctgcatggtgacctctcatgggagttcgggctttgttgaagggctgttgcctgatgggcagcgggctgcacgcaaagtctttatagaggtagcgtcttaattcgtaaatgaaggtgtttctatatttatagaacttaaatgaatatggaggtgtttccgcctaggcgccgatacgcgtgatagcgactatcacggacgatgatttttcagcgagaggggccgggagtagcctgtgttcattgactcgaaaccaccttcgcagggccaacgccatgaaacgtttcctcgctgtttcctttttacttgtcacctctgtccttgcgggttgtgcgacccagccttccccggagttgcgtccctatacggccgaggaaaccaagcagttggccctggaagccctgggccgtcgcggcttgtcgtttgacgactatcaacgccagcgcgccgcgttgcttggccagccacaaaagcctttcggttttgatcgccaaggtgaaatgaacgccgagcgcagcgtggtcctgcatggccgccccagttgagcgcgcttcttgcatcaaaaagcccgaggcttcccacaaggaacctcgggctttttgtttgccatggggctacttcagcctgttaagctcaattccaggagcgttcctacgcacatttaaataaagttaccttctttaatggcattcgatcggttaaacctgacgacctctgttctggtcgatgcccccgagacgctgctcttgggaatacgctctgcgagttttaacctcatgaataaacgtccgttgtatttcgactacgccgccaccacgccggtggatgagcgagttatccaggtgatggtcgagtgtctgggtttcaacgcccatttcggcaaccctgcgtccagttcccatgcattcggccaagcggctaggcagaaggttgaacaggcgcgtcgccaggtggccgagttggtgggggcgcaggccgagcagatcgtctggacctccggtgccacagaatccaacaaccttgcgctcaagggcgtggcccagggccgtggtgtggcgggtgggcatatcatcaccagccagatcgaacacaaggccacgctggacaccgcgcggcaattgcaggaagccggtgtggcagtgacttacctggtaccggatgcagacggcttgatcagcgtcgaggcggtcagcgaagccttgcgcgaggacacctttcttgtctcgctgatgctggtcaacaacgaactcgggaccctcaacgatatcccggccattggcgcgcgggtgcgtgagcagggcgcgttgttccatgtggacgcggcgcaagggacgggcaaggtggctatcgacctggcccagtggccggtggacctgatgtcgttctctgctcataagttgtatgggcccaagggcatcggcgcgttatatgtcgggccgcgggcgcagcagaaggtattggcgcagattcacggcggtggccacgaaggcggtttgcgctccggcaccctggcgacccatcagattgccggtatgggcacggcgtttgcccttgcggcggcgtctttcgcggatgagaaggccacgattgtcgcgctgcgccagcgcttgctggatcagttggcgtcggttgccggcttgcgtcttaatggcagcccaacccagcgtattccgcacacattgagccttaccttcagcgaaggcgaattcaattcagccgcattgagtgcaggcattgccttttccgcgacttcagcgtgcaattcggccagcaatgcgccgtcccatgtgctcctggccttggggcatgacgcccgcagtgccgctcgcactattcgcttgagcctgggccggttcaccaccgaacaggatatcgaccaggccgcgcagttgatcaaggccgcgttggcgagtgcgccggcattctgggcggtctgatttatcattcgcaacacataacaattattagtggttagcaggagacacaatgagtacgcagcctttgacccatggaacggttccccagcgcctggcgcacacccgtgaactgattcgccgcgaaggcattcatgccctgctggtgccatcggcggacccgcacctgtccgaatatttgccgggttactggcaagggcgtcagtggttgtccggctttcatggttcggtgggcaccctgatcgtcacggcggagtttgccggggtctgggcggacagccgttactgggaacaggcgaccaaggaactcaagggcagcggtatcgagttggtgaagctgcaaccgggtcagcctgggccgctggagtggttggcggagcaaacccctgagggtggcgtggtggcggtggacggcgcggtcatggccgtggcctcggcacgcaccctgggtggcaagttggccgagcgtggcgcgcgtctgcgtaccgatatcgatgtactcaatgatgtctggcaagaccgcccggcgctgccgaaccagccgatctatcagcatctgccgccccaggccacggtcagtcgtggcgagaaactggccgctttgcgcgccagtttgaaagacaagggcgccgactggcatttcatcgcgacgctggatgacatcgcctggctattcaacctgcgcggcgctgatgtgtcgttcaatccggtgtttgtgtcctttgccttgatcaatcagcagcaggcgactttgtttgtggcgttgggcaaggtcgatgcgcctctgcgggcggtgcttgagcaggatggcgtgaccctgcgtgattacagcgaggtggcgcacgcgctgcgagcggtaccggcgggcgcaagcttgcaagtagacccggcccgcgtcaccgccggcttgctggaaaacctcgacgcgggcgtcaagctggttgaaagcctcaaccccaccacactggccaaatcccgcaagagcctggcagacgcggaacatatccgccaagccatggaacaggatggtgcggcgctgtgcgaattctttgcctggctcgacagtgccctgggccgcgagcgcattaccgaactgacgattgacgaacacctgaccgctgcgcgtacccgccgcccaggctatgtatcgctgagcttcaacaccattgccgccttcaatgccaacggcgcgatgccgcattaccacgccaccgaagaagagcatgcgctgatcgaaggtgatggcttgctgttgatcgactcgggcggccagtacctgggcggaaccacggacatcacgcggatggtgcccatcggtacaccgagtgaggaacagaagcgcgattgcacgcgggtactcaagggcgtgattgccctgtcccgtgcgcagttccccaaaggcattctttcaccgttgctggatgccattgcccgggcaccgatctgggcagaaggcgtggactacggtcacggtacaggccacggcgtaggttatttcctcaacgtgcatgagggcccgcaggtgattgcctatcaagccgctgcggcgccacaaacggcgatgcagccagggatgattacgtcaattgagccgggtacttatcgccctggccgttggggcgtgcgcattgagaacctggtgttgaaccgtgaagcgggcaagaccgagtttggcgaattcctcaagttcgaaaccctgaccctgtgcccgattgatacccggtgcttggagccgtcgttgctgacggcggatgagcgtgaatggttcaacgcgtatcacgcccaggtgcgtgagcgtttgagcccgctgctcaatggtgcagcgcttgagtggttgcaggtgcgcactgcggcgatttgatcggttgcagccaaggcattgccggctgcaatcgatatctagctgagcgcttcacgcacaaagtccagacggtcctggccgaagaacagctggtttcctacaaagaaactgggagcgccgaacacgccgcgcttaatggcttgttcggttttgtccttgagagcgtccttgacggctgcatcgtttgacagggccagtacctgctcgggatcgaacccctgttcggtgagcacattggccacgacctctgggtcgcccaagtgacggccttccacccatagtgctcggaaaaggcagtcgatgaagtcgaggaagcgctcaggctggtggatttgaatgccggtgacagcgcgcatcagcagcaaggtattgatgggaaagtgcgggttgaacctgagcggcacgttgtagcgtttggcgtaacgcgccaggtcatcgagcatgtagcgacccttggcgggcaccgtgatcggcgaggcattgcccgtggccttgaatacaccgcccaatagcatgggttgatacaccacctgtgcgccggtttcggcacacagcgccggcaactgggtataggccaggtaagtggcggggctgccgagatcaaagaaaaactccagggttttactcatggtctgtactcgctgcttattgttatagggggcgtcaccaggtttcgttccaggggcgcaggtccagttcgaacgtccaggcgtcccgtggctggcgatgcaggaaccaatagttgtcggcaatatggtcagggttgaggagggcgtcctgatccttgagggcgtacttttgcgggaaattctcgcgaatgaagtcggtatcgatggcgccgtcgaccaccacatgggcgacatggatgttcatcgggcccaactcccgcgccatgctttgtgccagggcgcgtatcccgtgtttggcgccggcgaaggcggcaaaccctgcgctcccgcgcaagccggcggtggcgccggtgaacaggatagtgccgcggttgcgcgtgaccatgcgcttggcgacttcccgtgcgttcaggaagccggagaagcacgccatctcccagatcttgaagtacttgcgcgcggtttcttccagaatgctgcaaggcacattggcgccgatgttgaagacgaacgcttcaataggccccagctcggtttcgatttgctcgaccagtgcgatcacgtcttcttctttacgtgcatcacaggcaaagccatgggcttcaccgccggctgactgaatgctgtctaccaggggctgcagtttgtcggcgctgcgacgggtgacgcaggcgatgtagccttcgcgggcaaagcgtctggctatggcgccgccggttgcgtctccggcacccactactaatacgattttcttgttgtgcggcatgggaactccattggctcgatggtcgagcaggagtttagccttcatgccgcaaatggccgggatttaagatgagcagtcaggacagactgctcgggcaactatttgcagatgacgatcatgctacggctggtatagccggcagggttgagaccgaaggggtagtccccaggctcctcggagttatcgccggatttggcgatcacccggtagcccttggcgccgcatgagttggcagcactggtgtagcactggtcccaggaggaggacaggcccgaacagttgatatgcagccctttcttaccccgtttcacttctgtttttgtggttgcagcacagccagcgatgcccacaaccagcaacagtatcaaaattcgtttcattcccatccttaatagccgccctgcaaaagaacagagccgctttactcgctctcgagcgaagcgttcatgctgtccgtgccgaaattctccatgaatgacattcggttacggcctaaacatggcctaaatgagcggcaaataccagcgctggcttcaaagacgatcagtcggcgggcaccagcggtttggattcgttacgcatcgtcaacgtggcgcctaccgaagccaggataatgcaggtgatggccagccattgggctagagataaatgctcatgcagaaagaacaggccggaaagggcgccgaacgccggttcgatactcatcaacgtgccgaacgtgcgggcgggcagccgagtcagcgcgaccatctccaacgtatagggcaaggccgtggagagaatcgcgacgccgatggcgatagggatcagggcaggtgtcagcagcgcggcgcccgcatgcacgatgccgatcggtgcgacgaacagggcggcaatcatcacgccgagtgcggcggtctgaacaccattgtcgttccctgctttttggccgaacaaaatatagagtgcccagcatccgcctgcgcccagcgcgtaagccgcgccgatccagtcgataccgctactggcctcacccatcggaatcaacagcagcaggccaatgattgccagggcaatccacaggaaatcgacagctcggcgcgaggcataaatagcgacggcaagcgggcctgtgaattcgagtgctactgcaatccccagcggtacggtgcgaagggacatatagaagaggaagttcatgccgcccagcgccatcccgtaaatgatcaccgtgcgcaaggacttggctgtcagcgtggcgcgccatgggcgtaatagcaccagcatgatcacactggcaaaaaccaagcgcagggcagtggtgccctgtgctccgacgatagggaacatgcttttggccaatgacgcaccggattggatggacgccatggcgattaatagcaggccgatcggaaacaatgcggatgccaggctgcgaggaggggtggtcattgcgggagttcttccgaagtcatgatcgataaatacgtggcgctatgatgcttaactgccggcgaatgagcaatatattgcgcaaaaactgtctcgttgctatctatatagtggaagtttcgggtttttgaggtttttgataggaaaactgaataattgggttgacggcagattctggaagcctataattcgccccacttccggcgcagtcgaaacggaaaactccttggtaaacaannnnnnnnnnnnnnnnnnnnnnnnnnnnnnnnnnnnnnnnattccgaaaccccaattgcgaaagcagttggggttttgttttgggcgctcgaaaattccagcgcttctggcaacattaaataagctgccgttgagggaattcgatacaaagtgtttctgcatttttgctatggtgcagcacattttcacaaggattgatccttatccgcaggatgcggcgtcgaccttttccaacgagatgctgtagaaatgcctgaaccgataccaatcaaagatcacgaaaaagaaaaccgcctggtcaacaaacgcttgctcgcctgcgcgttgctggtaattgggatcacatgtgcgctggtaggacgcatgtatttcctgcaggtggtgcagtacgactaccactccacaatttccgaaaacaaccgggtccacgtactgcccattacaccgactcgcggcttgatctatgaccgtaatggcgtagtcctggctgacaaccgccctagttataacctgaccatcacccgtgagcgcaccgccgacctcaaggctgagctggacgagatcgtcaatctattgcacctgcctgccgaagaccgtgcagtgtttgataaggcgctcaagcaggcccgtcacccgtttgttcccgtcacgttgttctacgagttgaccgaagagcagatcgccgttttggccgtcaacgagttccgcctacctggggtggacgtcgagccacaattcgttcgccattaccctctgggcgcgcactttgcccactccatcggttacgtcggtcgcatcaacgaaaaagaatccaagacccttgattcggtggagtaccgtggtacccaatccatcggcaagaccggaatcgagcgcttttacgagtctgaactgcatggtcacgtcggttatgaagaggtggagaccaacgcacagggccgtgtgctgcgtgtgctcaagcacaccgatccgatccctggcaaaaacatcgtcctgagcctcgacgtcaagctacaggaagctgccgaagaggccttgggcgaccgccgtggttcggtagttgcgctcgacccgcaaaccggtgaagtactggctatggtcagcaaaccgagtttcgatccgaacctgttcgtcaccggcatcagctttaaagagtacgccgcgctgcacgactccattgaccgaccgctgttcaaccgcgtgctacgcgggctctatgcgccaggttcaaccatcaagccggaagtggccattgccggtctcgacagtggtgtcgttaccccacaaacccgagtgttcgacccgggttactatcagttgccagactttgaccacaaataccgcaactggaaccacagcggtgacggctgggtggacatggacgcggccatcatgcgttccaacgacacttacttctatgacctggcccataaactcggaattgatcgcctgcacgactatctggctgagttcggcctgggccagaaagtgtccctggatatgttcgaagaatctgccggcctgatgccatcccaagcctggaagcgtgccacccgtcgccagccgtggttcccaggcgaaaccgtgatcctcggcattggccagggctatatgcaggtgacgccactgcaattggcccaggccactgcattgatcgccaacaaaggtgtatggaaccgaccgcacctggccaagaccatcaatggtgtggctccggtagatgaacatccgatgcccaacgtggtgctcaaggacccgcgtgactgggagcaggtcaaccacggcatgcagttggtgatgcacgatccccgcggtatcgcccgggcggcagcgcaaggcgcccaataccgtatcgccggcaagagtggtaccgcccaggtggtggcaatcaagcagggtgagcgctacaaccgcaacaagacgttggagcggcatcgcgataacgccttgttcgtcggcttcgcgccggccgaacatccgaaaatcgtaatttcagtcatgatcgaaaacggtgaggccggcggccgtgtagccgggcccgtggtgcgccagatcatggatgcctggctgctcgaccaggaaggccacctcaagccgcaatatgcagcgccggccaaggctcccggcgatccacgggtttgactcagaccttccattcgtcccagcgcgctacgccgtcataggccagccagggcacttcatgggccgtccagatatgcgaggtgggcctgacgcccggatcatcatccagcgtcgccacccgcacaatcacgtggggttgatgcccacgttcagcgatcagatgcgcgccgcaacgcgaacagaaatgcctgaatttacccggcgaagactcaaaggacgacagtagttcctcaccctgtgtccagcgaaaatgctcacgcatcaccccagccgtggcgacaaacgcggccgcgtgtgccttgcggcagctttcgcagtggcagtggctgatgggcatgtccaggctgtccacttggtagcgcacacctttgcacaagcaacttccattcagtgggtcagtcataacctatggccaggcaaggaggggtcatcatcatcgcgcacaacgcaaggttgcgcattggttgatgtcgcctactgttcaatgaaggaggtgacttatgcacgtattagatcgcatcgaacgcaaagtcctgctcaacgcatcacgtaaacaggtgtgggaggcactcacacaggctgagcaatttggtcagtggttcggtatcgcgcttaacggtaaaacctttgtggccggagaaaccatcgaagcgccaattacctacaaaggctacgaacatgtcgtgtggaaggccaggatcgaacgcatcctgccacaaacgctgttttctttctggtggcatcctttcgcagtggaagagggcgtcgactacgacaaggaaacaccgacgctggtggagttcacgattgaagatcgcgctccaggcatcctcttgcgggtagtcgagtccggttttgaccaggtccccgaagcgcggcgtcagaaagctttcaagatgaactcccgtggctgggacgaacaaatgggcaatatcgaaaactacctgagccgagcctgacccgaacgggcatcatggtggatgcccggcttcacgccagcgtgcatcgattgctttagaaactcatctgccactggccgaccaccgcatgattgcggctattgctgcccagctcgccgttgtaaccgacactcaggttctgctgcgcagacaaacccaccgccaaccccacttcaaccatcaagctgtcgcggtccagtgcgctgccttcaatattgaaagcgtcgccgccaatcaaaaaagcctgccgagtcttgctgtcgacattgccatagaggtgccgccagccgaagctggcctggggggtcaggctgatgccattgtccagttggctcagatgtgccaggcgtaccccgaaggtactgctgacattgtcctgggtttgtgcatccaccttgagtgaagcatcaccgcctttctcgcggtagttgtcgcggtgatagcgctgatagccgaggttggcgaagggctcgatattcaatcggccgttacccagcatgtaacccagttcggcaaaggcttgctggctatcggcgtcgtaatcacccttgggtcgctcgctgaaacctgcgaactctactgtgcgcttgttgttacccctgtgttggctgtacgcagcccccaggcgcaacgccaatgggccatcctggcgtacggcatatgcccccgcgtgccagctgcgtaatgaattatcaacgttgtggctgtccatatcggtcttcgaatagccgcccagtacacccaggcgccagagcggcgacaaggaccagtcaatacccagcaggctgccttgtgtgcgttgctgtgaagactcattgccgtgctggccatcgagcttgccgtagctgccgataccttgcagccacacgcggcctcgtgcgtttggatcattcaagttgcgcgcactgctggggatgccagttacggccagctcaggtgtttgcgccgactcaagcccgaccagcaagcttgaactgctgctcatctggcgcatggccgacagcatggacgtgcccacttggctgctggccgccagtgtggcactggcgaggttggcgttgctgctgcctgccagggcctcgagcgcggcgctggccgtggtctccgaggtggccagcagcgcgtcgtagagcgggttggggtttcgcaccatggagggcggggggaaactgccatcccagttgctccagtggctccacgtgatggactcgatgctgttgactgcgcgggcggcgttacgggtacgggcgtaatcgatgaactcgacatcgttgcgcgtgtagctcaggttcacccggttattgtcgtagctgagtgttggcgacaggaacgcgtagtagctgcgcaggttggattcatcgaaggtacccgtaatgctgcctgcttgcaggacggtatacgtgctatgccagggatactccatcgagtaacccggctgcggccacaaataggcaccgttgaggctggcattgccgaccacatgggttgtcgctgcactgccgtcgggataagtagcgaactcgaatgtagagcctgggttcatgatcaggttgccgttgacctgaggcgcgccgacaacggtatccgtgatcaaccttccgctgacggtaagattgttgactgagcctcggccccggtaagtcgcgccttggtcgacgatcacgtcgccagcgatgctgccctggttgttcaagtgaccattggcaaagaggcgcgcgccttcgctgaaatcgctgcgaccattgagtacccagtagccgcgacgcacttgtagcacgtcaaaattgcgcgtcgcctcgaccgtcccgtcgggttcacgcgtatctgaaggataatattggtagccctccagaaccatggtgttatgccccgaaccgccgtcgactatgccctcaaagcgcgcgccagggtacagtgtcaaggtgtcgttgccgccccccatgtccagggctacaccattacccccgctgatcagggcaccgttgaatacccggtcgtcgaaattaccgataaagcgcgcgccatagccatcaagcccacgcaggtcgacgaaatttctcagctccgttgcgccggtcgccggcccatcatggccatcacttactaagaggccattgttggcgcctgtgattgaaccggtacgtggaacgcctgtagaggggtcaaacgtgccgccattgaacaggtagccgccgccgatggatgcgccatcgctggtgttggctcggccattcttatccactccactggcgccaaacgcctggataatgcccgggttgtcgatgtgcgcaatgcccgctatgcgtagtccatcgccgtcgacgttttccaggcgaccgtctcgtccgccggtgatcgcgccgtagttgtacaccgtgccgtcgcctgttatcgaaaccccagcgccgttacgtccgataagcgtgccccggttgctcagcacattgaattgttcgcccgagagcgcatgcctgccgcccgagatcaccccggtgttttcgatgcgcacatcggtcgcagcgcccaggctaatagcgtctaatttatcggcactgatcgagccgtcattttgaatgaagacattgcgttgccaatcaggcaggttttggcgaacgctgacggcggtcgtctgggtggtgatgctgccggtcttggtcacccgcaaactggggtcgtaaaaatagccactgcccacggtgagcggcgtattggtcggcgtatcgattaatacttgagcatggccggcaggagaaagcgaggcgccggaaacaatcaacgaaatagtcagggccagacggcgggggacgaacgacatgcgcgaaatccttttcttgaatcgcgctatcttcctatatagccatttgatattgccagcgcattcttatcctaaaaagcgatgacatcctttttatgatattgcgcgccaggtgtgcgtttacccgccgccttggcccggatgccgagtagaatcacgccctgaacgcgattcttgaggtgcggtacggtggatttacagcagggttttgtcctgacccggcattggcgcgataccccggcaggcacggaggtcagcttctggttggccaccgaccaagggccacggtgcattcgcctacccgtgcaaacctcggtggtgttcatccctgaggcttaccgcaagccgctcgattggttgctcaaggacgagcgcgatcttgagttgcgcccgttgcagttgtgcgactttcatcaccgcccggtcctgggcctgtacgtccgccagcaccgccagttgatggacatcgaaaagcgcctgcgcgctgccggggtcgatgtctacgaaggtgacgtgcgcccgccggagcgctacatgatggagcgctttatcaccgcccctgtgtggttcggcggcacgccggatgcgagcggcaccttgcttgacgcgcagatgaagccggcccccgactaccgtccgcccttgaagctggtgtccctggatatcgagaccaccgcccagggcgatctctactccatcgccctcgaaggctgcggcgagcgccaggtgtacatgctcggcccgccgaacaaaaccgacgccgtggatttcaaactcgactattgcgacacccgcgctcaactgctcgaacgcctcaaccaatggctggccacgtttgaccccgacgcgatcatcggctggaacgtggtgcagttcgacctgcgcgtcctccacgaacacgcccagcgcctgaacgtgccgctgttgctgggacgtggcggtgaagccatggcctggcgcgaacacggtagccgcaatcactactttgcggcagcggcgggaaggctgatcatcgacggtatcgaagccctgcgttcggccacttggagttttgaatccttcagcctggaaaacgtcgcgcaaaccctgcttggcgaaggcaaggacatctccacgccgtaccagcgcatggatgaaatcaaccgcatgttcgccgaggacaagcccgccctggcgcgctacaacctcaaggactgtgaactggtcacacggattttcgagaagaccgagctgctcaagttcctgctcgaacgcgccagcgtcaccggcttgccggccgaccgtaacggcggctccgtggccgctttcacccacctgtacatgccgttgatgcatcgccagggttttgtggcgccgaacctgggcgacaaaccgccccaagccagccccggcgggtttgtcatggactcgcgcccgggcctctatgaatcggtgctggtgctggactacaaaagtctttacccgtcgatcatccgcagtttcctcatcgacccggtgggcttgatcgaaggcctcaagcatcccgacgacagcgactcggtggaaggctttcgcggggcgcgcttctcccgtacccggcattgcctgccatccatcgtcacccgcgtgtccgaaggccgcgaagaggccaagcgcgagcgcaatgcgccgctctcccaggcactgaagatcatcatgaacgccttttacggtgtgctcggctccagcggctgtcggttcttcgacacgcggctggcgtcctcgatcaccctgcgggggcaccagatcatgcgccagacccgcgcgctggtagaggcccaagggtacgaggtgatttacggcgacaccgactccaccttcgtctggctgggcagcgcgcattctgcgcaggacgccaatcgcatcggcctggcgctggtgcagcacgtcaacgactggtggcgcgcgcacctgagcaacgaatatggcctgcaaagcgctctggagctgcaatacgaaacccacttcagtcgcttcctgatgccgaccattcgtggcgccgaggagggcagcaaaaagcgctatgccggcctggtcgtacgcgaagatggcagtgaagaaatggtctacaagggcctggaaaccgtgcgcagcgactggtcgcccctggcccggcaattccagcaggaactctaccaacgcatcttccatcgccaaccccatcaggactacatacgcgactacgtgcggcgtaccttgagcggcgaattcgatgagttgctgatctaccgcaaacgcctgcgccggcccttgcacgactacgaacgcaacgtcccgccccatgtacgcgccgcgcgcctggccgacgagtacaacgaccgtctgggtcgcccgcgccagtaccagcgcggtggctggatcagctacgtgatcagcgtcaacggcccgcaaccgctggaagtgcgccaggcgcccatcgactacgaccactacgtcacgcgccaattgcagcccgtggccgatgcgatcctgccgttcgtgaatgatgatttcggtacgttggtgggcgggcaaatgggactattctagctaatcgaccacaggctcactattgcccttggctcaggaggaaacgcccatgtacaccctttatggcaccgacgaatccggctcctgcatgatcgaaattgccctgcaacgctgcgcagtgccgtggcatcgcgtggaggccagttcctggcaggacggcgagggcagtgacgcccttgcacgtatcaatccactcaagcagatccccactctggttactccaaatggccaggtactgaccgaaagcgccgcgatcctgatccacctgggcctggagtatcccaaggccgagttgctggccggcgatcgtacgcagatcctgcgcggcttgctgtatatcgccgccaactgctattcggcgatcggcatcatcgactacccgcaacgctggttgggcaatgctgatgaggcgcagcaagcgcaactggtcagcggcacacggcgctacctgcaccaggcttgggtcgtgtttgccgatcagtttgccggtcagctgtttaccccgagcaacacgccgaatgcactgggcatcatggcggcggcggtgtcgcgttgggatgacgcgcgcgaggtgctcggcaatctggcgccgggctttgcgcagagcctggagcaggtagacgccgaccctgtcgtggcccccgtttttgcccggcattggccgcagtggaaagtctcgtaaccggaagaaacaatgaccaggccactgtccaagcccttgcgtagcgggcttcctgacctactcttctcaaagaggtgtaggaatcatccttgaatttggctgtcgcagacatgaaactcaagaaccctgcatggaattcaaaggaggtgcgcatgctcatccggtcgctgaccctggctaccttgatggcttttacggggccgttgttggccgctgatgataatccgctcaagcaggagttgggcaagacgcgccccttggtggtcgtagagcttgatgctggaaacccgacactggcaacgctgaagaaacaactggaagaggctgccaccaagcagtccttcgaagagcgcagcatggtgttctacaccgtcaagttcggcagtatcggcgccgaaggggagaagttcgccaaggacccaaaggacagtaaaaagctcacgccgccagaaaccaacgcgctgatccgcgccctcaaactcggcgtcggcagcggtaccaaggtgatcctgatcggcaaggacggcgagaagaaactcgaaaaaaccgtacccccggacagcctcgacctgaaggaatttttcagcgccatcgatcagatgcctcaggcggaaaaggagcttgccgcacctgcggagccggagcctgttccagccgcgccagcggctccggccaagggcagcaaacccgccaagcccggcagcaaagcccccaaaccattggaggattgaaccggtctcatcccaccgtttgggtgggaaccggcctcaggccttccatggcttgagccaaagcccaagccccagcaacaccagcgcgccggccaggctgctcaaccccaactgccacccatcgttgtgcaaggggtgcagggccagcgccgccacacccaacagcaccccgctcaagccccactgcaacggccagcccagttggccgagcagttgctggcggtgcatcagcaacaggttggtcaccaccacgccacccaacgccgccaaggcgatccccggcaggccgaaacaatagggcagcaccaccaacaaggcggcgttgaccaggctgcccagcagttcgcagttgagcggcaggcgcgtgtcgccgctggcataggcatagcgggcgagcatggcgttccaggcgccaaataccaggggcgtggcgaaccaggccagcagcgccggcagtgggccgtcggcgctctgggcgggcatcagcagatgaatcagtgtggggctggcgccaatcaggccgaaggccgcaggcaggctcagcagggtcgctgcatccaggccgcggcgcagcagggccaggcgctgttggccttgctcgccgctcatcatgcccagcagcacttggttaaggctcatcaaggcaatcagtggcaggttgatcagcttgcgcgcgaggttgacccacgtcacagcgccgtctcccaggaaactggcgatcaagcgctccagtagtgccaggccctggctggccacgttgctggccaacaacgggccgatgcgccccagcaattcgcggcctgccagcgggtcgccgctgacctgccacggccgccagccgaaggaccagaccggcgccagtaacggcaggcacatcaacacactacccgcaaaaaagcacattgccagttcggcgctgtcgctggagctgccacggataaacaggtacagcaccggtggcagattgaacagtaaagagcccaggcccggcaggacaaaacgttggcgtgcctgcaagggaatgctgaacaacccatgcatcaccaggcctggcgcacaggccgccagccagcgcaggttggcggcggcttgggcatgggccgcggcgtccaggccggggccgatcaggcgcacccacagcggcgcgcccagcgccagtagggcaaacagggccaggcccacgcccagcaagcgaggggacaggctggccagccaggcttgctggcgctgtgggtcgcgttgctgatagaggggcagggcagccgctgcgagcaagccggcggccagggtcatgcgcaatgcttcgggcaaaaacaccgccaccagaaacccgtcgctgcgactgcccgcgccccaggctgccaccagcagccattcgcgggcaaaaccggccaccagcccggcgagcgtcgccagggtcagccagagcgtgctgccgaacatcagtggaacagggtgaacaggcctttgccacccaccttgtagttcagatcatggcagcgttcgcccatgattttggcgccgctgccgccaatgattttgtagggcgccacggctttggccaccacggtattggcgcttatcaccgaaccatagcccaggtgcgtgccgaagccgatcaacgcacggctgccgatccagacgtagtcgtcgatgtaagtcggcccggaaatcgaccagaactccggcgcttgcagatcatggctgccggcgatgagcaaaacgtgggaggcaatcgccacatggttgccgatcaccagcccggcgcgagcgtctacctggcaatgccaaccgattaccgaatcgtcgccgaccaccagattgtgcatgcccagcacttcggtgttacgccacaagctggagcccttgccgatcttcgcgccacccaggcgcagccaggcgatgcgcacatggtggctggggatcttgttgatcaagatgttgtaggccatgtcccaggcactgcgccaccggtctttgacggttgcccagtttttgccgtaacgcggcagtagctgggccggcagatcctgtttcatccgtcggaacaggcggcgcgccaccggttgctcaatcgcggtttccaggtcgatggagctgatccagaagcgcttgttgtcgccttcgccttcttcaaataccacgtcgttggccaggcaccagtccagcgcctcttccaggtccggcaggctcacgcccatttcagcggccagcgtggggaggcggtcgcgcaagtcggtggagtgaatcatccggtgcttcatggttggttatcctttggcgcaatagcagcaacaggggcggtaatggaggggcgcaggcgcacctgttgcaggctcatgcccatcaacagccagaacagcgcgatcagtacaaaggtgaagctgaaatagtggtcgaaaatccccgtcagcagcgccgccagcacgccgcagatgcaccccagccacagcgcattgtcggcggtgactttgcgcacctggcccaggggccgcacttcgcgccaccacaacagggtgacggtgataaatagcagcatcccgggtaggcccaccttgtagatgaagttcagccacaggttggagatccccaacagattggaaccgggcacgggcgggtcgatcttgaagccgatccccagggggaaggtcgccatggcggtggggaacctggcgtactcgtcaaagcggatttcggtactggcgttggtggtcgagaagatggtcatcaagcggtcctgcaacggcggatagaacatcaccagcgcaacggcgaacgccgccccgataccgatgatgcgcccgctgttcggcacgcgtttgtaggccagccagatcaacaccagcgccagggccacgatggcgccacgggaaatactcagcagcaggccggcacaccccagcaccgccaccgccaggcccagggcccggcgccagccgctgcgggtccagccataaaacagtgccagcggaataaacagcaccagcacgcccccggtcaggttggggtgcacccagggcgaggccatgcgcgtgtagttggcggagaaaatgtccttcaccgcttccgggtgggcgtatttgaggtcggtgagaatatcgatcatcgacatcgcattgcgcgtcttcaggaacatgaagatcgacagcaacagcatcgccaggttacccagcaacaaggcgaccaccaccttgtcgcggtcggcgtcggtgcgcagcagcagcggcacgataaacaacatcgacaggttcatcagccagcgcacccagttcaccggcccgttgccttcggcatggatgatcagcatgccccagataaacggaatggtgctgaacagcatcagccacatcagcgcccgctcggtcggccgccacagcatgaaaccacgggtcttgccgatgaacgcttgccagaacaccccgacccaggtcagccccagcaccgcctcgctgacggtggtgcggatgcccagttgcaaggtggtgtagggaatactggtggccagtaccgcgaaaatcagcaagccccacaggggaaagcggatcagggtcaaggccacggccacaccggccaccaccaacatgaccttgatcggcgacagggccaacagcaacccgccgaacaccaggcccagcagcagactgacgaattttcctggcagcattagcgatccaattccttgagcaaagtgtccaggcgcgcgcgataagccggttcggcaaattgccgggcccaggcgcggtgtgtttcgccgtcttgcgtggcctcggcgccggccagttgttgcatgaccttgtgcagttgctcggcgtcatggggggcgaagcgcggggcgttgggcggcgcgatttcatccagggcgctgccgcgtgccactgctaccggcgtgccgacactcaaggcttccaccaccggcaagccaaagccttcggcataggacggctgccacaggcacgcggcatgacggtagagcgcttggagttggccgtccgataaaccgctgcaccaatgcaggcccggcaggtcacccagtgccgccggtacatcgctggcgtggcccaccagaaccaaatccggcacatcagggttcagcgcacggcaggcctgccattggcgcaagaagaacgccatgttcttgcgcggctcccgcgtgcccaccaccagccagtaacgcgccggcaggttggcgggcagcggctctggcgctgcattcaattcgggcacaaggttgttcagcacgcggaacttggcccgggcccaggggaacaggcgcgcggcttcattgcaggaaaactgcgaagggcaccacacccgatcagcctgccataccgaccaggcaatcgaagccccgtcgatcaggcggtaggccagggccttgagtttggagcgatggaagttgcggtgggtgagctgaaacaggtcatgcagcaccagcacatagcgggtgccggcgggtttgcgacacagcggcaagcccatattggccgtggcgatgtacaggtcgatctgctgctcgtgcagcgccttgggcaagaacccgcgctcgaaccgcaggcgcacttgtggacgttgcaggccgtccagcgggctggcccaggccgggcaaacggcagtctggcgctgcggatgctccaagggcgcctcagtgaacagcaccacctcggtgttgccccgcgcgcgcagggcgtcttccagggccacgacctggcgggcgatgcccgaagacggcgcaaccgtggcggggcgatagtccagggctacgcgcatggctgagactccttggcggtgagcaagctgtggtagaggtgctccagttcattgcccgccactgcccagtcgtggtattgccgcgcatagtcgcgtgcggcatcggccagtcgcccggccagcgccggttcatccagcaggcgcacaacggcgtcggccagggcctcggcgttttcgccggccaggtaatgcacctgcggctgtaccgccaacccggacacgccctgggccgtgctcaccagcggcaagccggcggccatcgcttccaataccttgagcttggagccgccgccatggcgcaacggggcgacaaaaccggcgcagcggcgttgcaaggcgcacaggtcgggaacaaaccccagccactcgatacgttcatcgggccaacgctcgcgccagtgttcaggtaagccatagccgaccaccgccaggcgggcgttcgggcactgcaaccagaccctggggaagatctcttcaagcagccactgcacagcgtccaggttcggtgcgtactcgtagttgccgacaaacaacaggcgctggctctgcgcatcggcgttgacctcggcgaaggcgcggctgtcgaccccattgaccaccacgctcaccggcgtcgtcgacagcggccgcatggcctgggcgtccgcctcggtcacggcgaccacatgagcggcggcatcgaacgccttgcgttcccattgccggcagcgccactggtcgtactgcacaaacggtgcggcccacttggggaagcggtcataagtggcgccgccaaggctcgattccaggttgtgctcggtcagcacaaactcgcgccgttgctgctgcaatgtgcgtagaaacggctgcaggctgtagctgtgttctacctgaatcacgtcccagcgctcattcaacagttgcgcaaactgggcctgcaacggcgccgacaggccgttgaccgtggtcaacagcggccagggcgcgaacaagcctgcgagcagggtcagcgggtgtttcagtggccgacgtggcaccacgatcaggcgttcaagcaacggctccaaggccgcatgcgccgcgtcatcggccggcgttttcgattgcgccagcagcgtgatgcgatgcccgcgctcactcaaggtgcgcagcaaatggtactgccgcgtcttgccgccgctggtggtcggccacggcaggtagggcacaatccagaggattctcatgtacagctctccatgcccggggctaccacaccagtatctgcaaactcggcttcaccgttgggcgaataccgttgtcgtcgctcagggtttgccgggcgccggtcagcgggtccagcagttccgcgtttttgatgccgggcaggctgatgctgctgcctttcgcactccaatacatcagcaggtttttaccgtcagggcgggtccaggccacgctgtagaagctgtccggtacatcctgcaactgcggcgtgttgccgggtttaagcgtggggccggtgatctccaggaagcgggcgagggcggtgtacaccggcttgggttcgccatcaaggttcaacaggccgtaatgctggtcgcgtggcgaggcgcgttggtcgaggtcggacaacgcgaacaggaagatcttctggtagtcctgggacgccatcaacgccaggcggcgcaaggtgtagtcggcctgcccgtcgataccgatcaggtcctgcatctccttggggccggcatagctggaccagccccattcagtggcccagacctgcttgatcccggcaccgtgcagcattgaattgagttgatcgccgcgcagtagcacttcgttcttgcccggctcatcggtttccggagtcatcgaataagggtgataagccgcgaccatgcccaggctttgcacccccagcgcgccgagtgcttcaaacatcagggttttgccacggggcggcatctggctgtagtacgccatgccgcccatgacctgcagtttgccgggcgcggcaaggttcagggcctggtgactggccaataacaattgcccgtactccttggcgtcgactttggggcgccagttgttcggcaggttctgctcgttccacacctgccaggcatcaatagtggggtagcgtttggccagaagtgccaggcgcagcgcatacacttccggatcccgtggtcggtactgatcctggaactgcgcccccttgggggcggtggtgataaagggcgccgagcccaccaggtaaaacaccgagcgcagtttttcagcggtcagggtgcggtccagttcatcgaaggtgccgagctgataatcgtcttccttgggttccaggcgatcccagtgcagatcgacccgcacccattgcaatccaagctttttatattgcttgatctgcttgttgtactgctcgggcgtgaaccacagaaagtgcgcgttcacgccgagaaaatccttccagaccacgctgcgctccggggccaggttcaccggttgtgcatcgactttttcactcaacagcagggcgctaccgacggcgattgacagcgccagcggcaagtagcgccacagtgggcgaacggatgacagattcatcgcaacggctcctcacaagcatcccgaaataattcagcaaaccgctgggccgtgttggcccactggcgttgatggccgatttctccagcccgtgcggcccattgctgtgcctgttgcgggtcgagaatcaagcggctcaaggcgttgctcaaggacgctgtatcgccctgctgataggtaatgccattgccgccggccacctcttcggcaaaggcgcgggcgttggaggtgatcaccccgcgcccgcatgcattggcccacgacagcgcgccactggtgccacgcatctgccccaggaagctgagttttttcgattcgcgatagggcagcaccatcacatggtgcgcctggatcgtagaagggatctgcgccgagggcaggtccagttgccagtccaccacatcttcaagatgcagggcgctgatctgctcgcgtaggccgtcgaggtagttgccggcggggtcaaaggtcatttccggcgcggtgccaccggccagggtcaggcgtacctggcctcggcattgcgggtgggcggccagtgattgggccagggccagcagcaagtcctcaatgcccttgccgcggtagataaagccgaaatacagcaggcgcaacggcgccagtggcggcaaggcctggggcgcgatgggcaggttgccatgggcaatcaccgccacctgttgcgggcgcaggcccatgcgctggcgcaggcggtcgccgcccaggcgggtgagggtgatcaggcggcgcatgcttttggccaggcgccgctcttcgtgcaaggtcaacgggtcggccagcagcgctgccgcctggggcagcgggtggggcaggcgttcaagcagggtcaaggggaaaaacagcttggcccggcgccagatcaggcgctccgggtcatgcaccgtggcggtcaacggcaggtgcggttgcgcccggcgcaggtactccagcgcctggaactcaccgaagcgtccaccccccagttcagcatgcaccaggtccacgctgcgccagtcaaaggcctgcaggcgcttcaactgttcaggcagctccaggcagccggcgagcggggtcaccacctccaggccttgttcgatcaacgcgttgcgcaaatgcgcggcgtaatcggcgatcccggtctgctccggtggcagcggcgccagcaatgcgatacgcatcaggccgccccacgccagctattgagtcgcgccagcaccttggccggcacttcgaagcggcggcggttgaggatcatgccgtcgactttgccgaacgcggtggtcagcaacgacacggcattttcaatagttggtacggtgctggtgcgggcttcgatcaccaacacaatctggtcggcgcggcgcagcgtcaggaacgcctgcgggttggaggacagcgccgaggcgtccagcagcaacacttcacccggcgttggcgcgttcgccccatcgaccgaaacacggtgaccacgctcctccagcaggcgcttgagttgctcggcgataaaggtgacaccctcgccatggcgcgccgaggtcaggcccagggcaaaaccttgggtggcgatgcgatccaggggcagcaggctgtacaagcgataaaggctggcggtgacggctgccggcgttgcgtcctgtacatcgggaatgctgctccacagcggcacgtggaacatctcctgcaagcgcgtgccatcgtggatgcgctggtccagcaggtacagcacatagatggtcagcaggcctacggccacgccagctggaatagcgaacaacagcatcagcaggctcttgggaaacacgcgtgccgggttgagggtggcgtgttcgatcagggcgatgttgctgatctggctgttgtccagttcatggtcgattcgcgcctgttcaagattgtccgagtacaaggcgtagcttttttcggcggtgcgcagttgttggctcagggtgttgagttgcggttcatcggtcatcgcctggtcacgctgggtgcgcagttcggcaagggtcttgtcgtagttctcgatttccccggccagtttgcgctcttgcaattgggcgtcgatcatttgctgtttgacgttgatcaccaggctgttgggcgcggtgttctgcgagcgttccaggcgggtggcttcctgggcgctgagggcttccatgtcgcggatgttctgctcgatctgattgacctgcggggtacccggcaggtaagtgcgcaacagccgagcccgctccacttgcagcgcattgagctggcgcttgaggtcgagttgggtggggttgaggctggtttcgcgcatcgtgaccacgtctgccggctggctcttgatctgctggctggcgttggccagcaggctgcgaatccccgagatctggttttgtgcgctgaccttggcgtcggtgacgcggtcgatctggttggtcaggttcttcaggcgcgcatcgacactgatcgaatcgatctgcttcaagcgaccttgcaactggtccttcaggctctggatattctccgccaccttggcgcgttcggtttcatagaaggtatgcaggctcttgcgcccgagaattcgcgcacgttcttcgaggtaagcgttgacccatgtctcgacgattttttgcgccaccgccgggtcgtcccaggtgaacgaaatctcgatcaccgaagagcccggctcgtgaccggcggtgaagttcttctccagtgaggtcgccaagcgctccagcgggctttgtttctcggcaaggcccacgaactgcagcacactacgaatgccattgatgacttcgccaacgccctttttgatgtagaacttggtgaccttccagaagccttgcggcggttcggcggtcatcgccatatagcgttcggcaacgatatgcacgatgggccggcccgtgagcattttttcttcgtcgacaatcgggtcgtgctgggtgctcggggcaatcagtgtctggcggttggcggcctcgatcggcaaggtggtgttgtcccgccctggcttgaccagcaagcgcgcgtccgactcgtagcgagccggcagcaggaaggcaccgagcacggcgatgacgatcgtggtgagcacggccagtttgaattcgcggcggtagatgaaaaacagccgcagcaggtcgcgaagagagcggatttcgatcacaggatcactccattgcatatggggtttacgaaaggcgggaacacttggttcgagtgatacgaagcccgcttcataatccttggcctgcgttgatggttgggttgttgtagatggtgttgccgctatttttcacgtcgctcttgttcaggtcgtaattcaagccaataccaatccctttgttgatcggaaacagcttggtgaagtacatatccacagcctccaccgtcgcgccgatgcccgactgcggcacaaagatcaaatcgccgcgctgcaacgctacccgcgggtgattggggttggtcaacatgctttccagactgatgaagtacgtcctgtacttgccgtcgggaccggtgcgcagcaaggctacgttggaggcatccgccgagggcaatacaccaccggagctgagcagcgcctgctcgacgctgacgttgccggccaggtcgaaaaacgccgggttggacaccgcgccgccgataaacaccttgttgctcggcgcgctggcgatgttcaccgtcaccgcaggttcgcggtagatgcgcttgtacttctcggtgatctccttgcccaggtcttcgggcgtgcgcaaggccgctttgacccggccaatgttgggcaccgagatcacgccgtcagggcgcaccacgaatatcgtcatgtcatcggccgccgccggctcctgggcatcacgcacgatccgcagcgagtcgccgctctggatcagcacttgcgggggcggcaggtcggccagggtcagcgccgcttgatggccggccttgagcgtattgttgtcaggaagcggcacccgcgcgggggtcgaacaaccagccagccagattgaggcactcaagaggccgagcagggtaagacggaaacgtcggttgatagtcttcatgacggctcaagtccagtaggtggaaaacatgcccaggcgccgtttaagcgcgttgggcaggtggcgttcaaggtggccgaggcgatagcccagcaatttaaaggcactgcgcaccaccacttcgggggcgcggtacagcgcgttggcctcgcgcaatgcgtgcagttcggccagcacataacgtttgccttcgccgccggcgtcgccaaacgcctggcgaatccacggctcgcggccgtagaacacaccgatatcgaagtagcggcgaaactcttccagcaagcggtaatcatgggagtgataaacctgcgcactcgcggcatagcgcacctggtaaccggccagcagcatgcgcgcggccacataggcgtcttcactgccaatcacatcctgggggaaaccgcccaccgcgctcagggcgctgcgtcggtacaccgaaaacgagtcggagctgaagcaggttttgatgcccagttgcgctgcgtcgtccaggcgcttggtgcggctggccgccgggtaattgaaatgccgcgactgcgcgccgagcacgccggcaccggggtgcgggagttgccggccgtaggccacgccgttgagcggctccagttgcagctcgttgatcaggttggcgaaggtctcggcggtggcggggatcgcgtcctgggtcatcacgatcaaagcgtcgccgcccacctgctcgctggcccagcgccgggtaccgccgtggttgaaatcacgggcgtcaatcacctccacgcgcgcgccgaattcacgaaagcgcgccacggtgtcatcgctcgatgcgctgtcgaccaccagcatttcatccggctgcaacgtctgcatgcgcagcgctggcaacaggcggtccaggtggctggccgcgttgcgggtggggatgatcaatgacgtacgcatcagggcttcacttcaaccggcgcgcggccgtagatgtcgtcataacgcacgatgtcgtcttcacccaggtactcaccgctctgcacctcgatcatcaccaggtcgatgatgccggggttggtcaggcggtgcttgtgcccggcgggaatgtaggtggactcgttcatgttgagcaggatttcgcgctcgccattggtgatcattgccgcgccgctgaccaccacccaatgttcgctgcggtgatggtgcatttgcagggacagcgaacctttgggcttgaccacgatgcgcttgattttgaaccgcgtgctttcctccagcaccgtgtaggtgccccacggccgggtgacggtgcgatgcaggctgaacgccgggtgattctggcgcttgagttcggcaacgatatgccgcacgtcctggctgcgatgcgcgtcggcgatcagcagggcgtcgggggtgtcgacgatgatcaggtcacgcacgcccaccgcaccgagtacccgcttgggcgagtcgatgtagcagttatgcacgtcgtgcaggatcgcctcgccgttgatctggttgccattgtcgtcactgggcgtgagttggcgcagggcttcccaggagccgatatcgctccagccaatgtcgcagggcacgaccgcgacttgggcggatttttccatcagcgctacatcgatggagatatccggcgcggtgccgaaaccttccgggctcagctcgcgctggcgactgctgctgttttgcagactctggctgtgctccagcgcagcgttggccgcctctaaaactgccggtgcgtggctggccaattcttccagcagggtggcggccttgaagcagaacatgccggcattccacaggtgcttgccgccgtccaggtagccttgggcggtggccaggtcgggcttttcgacaaagcgctgcaccctgaagcccgcgcccagggccggcccttgttcgatatagccaaagccggtttctgctcggtcaggctggatgccaaaggtcaccaggtaaccggcctcggccaatgcgcgggctttttccaccgcctgggcaaaggcgctttcatccagcaccaggtgatcggccggcatcaccagcaactgcgcatctgcgccaaaatgctcctgcacatgcaaggcggccacggcgatggcggcggcggtgttgcggccaaacggctccagcagcaggtcgaggcccaggcgctgggtgttcaccgcgcggtagtcgtccagggtgcgaaacagcaggtcgcggttggtcacggtcaggatgctgtcgacgcccggcaagtgactggcccgcaggaaggtcttctgcaacaggctctggtcgtcgcgcatgcgcatgaagggcttgggcatgttctgccgcgaaaccggccacagccgcgtacccgaaccaccggagatgatgcagggaatcaatccgttaagtgggttcatcaatagacttccttggtggaaagaacggccgggaccgtcatgaaaacgatgtagaggtccagccacacggaccatttggcgatgtattccaggtcgtattcgacccgtttctgaatcttgaacagcgtatcggtctcgccgcggtaaccattgatctgcgcccaaccggtaatgcccggcttgacccgatggcgcgagctgtattcgctgaccgcttcctcgaaaggaatccccgcagccttggtggccgtggcgtgggggcgcgggccgaccatcgacatattgcccagcagcacgttgaacagttggggcagctcatcaatgctggtcttgcggatgatcctgccgacccgagtgatgcgcgggtcctggcgcgtggtctggtgctcggcgttgaggtcggtctgctcgacgtacatcgagcggaacttgaacacgcgaatcaggttgtcgttgtagccatagcgcttctggcgaaacagcaccgggcccttggaatcgagtttgatcgcgatggcggtcaccagcatcaccggcgacagcagcagcaggccgatgctggccagcagcaggtcttcgcaacgcttgataaagggcgaccagccccgcagcggcaactgcgaggtgttgaacatcaggatgccgcccacatcggtgattcggttatggccgtagcgcagggcggccatgtccggcaccagcatgacgttcaccgacatctgccgcaggcgcttgaccagcccattgatgcgctgctcggcggcccagggcagggtgatcatcacctggttgacctgttcggatcggatcagcttttccaggtcgcgggtattgcccagcaacggcaggcggctcaactccttgggaatgcgctcggtacggtcgtcgataaaaccgatcaggccggaacggatgtcactgttgcgcgacaggtgttcagccacatgcacggccgtgtcggtaaagcccaggatcacggtgcgctggaggaatttgccgttgtccatcaaatggcggtacaggcgcagcatcagtatgcgctccacgccaaacagcagcaggctcgcggaaaaccagaacacaaggttgcgtgggctcaactgcgggaacaggagcaggatctggtacatgaacaacaggatgcaaaacgccgagacccaagccaccagcatcacgcgaaaacgcaggcgattgctgaacaggtcatcggagtaaacccccagggcctggaacaagataatggtcaggatcgcaaagaacgccagcaggcccagatagtgagtgcgcatgtgttctgcgaccgggtccgggtagaacaacaggatgatcgccggcgagattgcggtcagcccgtgaagcagttttacgaaaacgacaaaaaactcaacgaaaccggtgcgagtcaaaaacaggctatcaacggacgatttaccgcgcatacatcagatcctcaatacaccaccagaacgttcctattcgtttgctcatccataaggcaggtatgcattacaagtggtgcaaatcgaacgacctctgttgctgggtaatccgtaatggctgtctagacgcaggcatttactgggtgatggctaaatagtggcttcattgaggatttgtgtcaatgatttggcttttcgtccgttttcttcggtgtccctctcaatgcctccatgatatgacggtttgttgacgtgtatggcgggtatttcagaataatcgagaatcgatgatggctttttggagtgtaggaacaaacctggggatttgcctgccagcgacgaaaagcttttgccggcgggaaggagggggtgggacaaggcttttttgtaggagcgaggacgcctggttcttgctcgcgaaagacgtcaacgataacgcgtgcttcctgaataaacgcggcgtctgtgagtttttcgcgagcaagctcgctcctacaggaggggtatgcagtgcttagaagttgcctttgagactcagcgtgaggttacgcggctccccgtagaggttaccccagcctgctgtaccaacggtctggtagtagtttttatcgaacaggttgttgccgttgagcgccacagtccaggtgtcgtccacctgatacgcaatgcgcgcactccacaacgcatacccggcctgctccagtttgatggtttgcaggcggtagttactgctttgggcgttgacgcctgcgccgactgtccatttcgacagcgcaccgtccaactggtagtcgccccacaaacgcagcatatgccgcggtacgtaggtgttggacaccgcgccttcggcggcactgtcgatgtttttcaggttcttggtttgcgtgtaggtatagccgccgaacacctgcaggcgttcaagcaattcgccgctcagctcggcctcgaccccttgagcgcgcactttgcccgtgtcggtgtagcagtagccgtcggaggagctgccgcagcgggtctcgaaatcggtttgggcggcgtttttttcgatggcgcgaaacagcgccagggagctgttcaggcgcccgtcaaaccattcgcccttgatgcccaactcatagttctcacccattttcggcttgagggccgaaccgctgaccgtagcgtaggagctttggggctggaagatatcggcgtagctggcgtacaccgaaaggttgtcattgaggtcgtagatcagcgcggcgaacggcgtgaccaccccggtttccttggtgcgtgcatcctggtcggtccactcgccccaggccaggttcagggactcacggcggttttcataccaactgacgcgactgccgagaaccagcatcaaaggttcggccagacgcaggcgcaaggtggcgtaggcaccgtattgagtggcggtttccttgaccgtgccgccacggtacatgttgggccagaaggtatcgtcggcaggttccgggaagtggtggttggggttgaagacgctttggcgctggggcaggttgcggatcgcatagacatcgtcctgagtgccacggctgccattggcgccgaggatcaactcatgttgcaggccaaaggcttcaaattgaccgtcgatataggcgtccaggccgtagtctttgtgatcgtagtccagcaaggctgcgtagctggtaagcgtgggggccgggttgccatagtccacggtgctctcgctggccgcgtatttgatgtcttgcaggttgcggctgtgtacagcgctgacttttagcttccagttgtcattgaagtgatgggtcatatcggcgaacagcgtggtgcgctggctttgccaatcgttccaggcctggccaaggcaggtggagcggctcaggccgaggcttttgccgtcacgataacgcggcaggccgctccagcacggcgtggagtcgacatcctcatagctggccccgaagcccagggtggtgtcagggctgacatccatgtccagggccgcgtaaaacgcctggtcctggcgcttggcaaggtccatgtaagagccacggttctgttggctcaccgccgcgcggccgcgcaccgtgccgctgtcgttcaatgggccgccggtgtcgaattcggcgtgatagttatcccaggtgcccgccgacaggccaaggctggtggtgggcttgtcctggggccgcttgcgcacgaagttcaccgcaccactggcagtgccggcgcccttgagcattccggcagcgcctttaagcacttccacacggtcataaatcgccatgttcgcgctgaaactgtcggcttgtatgtagtccttgccgatgtccagtggtacaccatcgaactggtactggccgagcatcttgaagccccgggagtaaaaatacttgccgcccatgggcgattcgtagctggtgatgcctggggtgcgctccagcaattggtcgatggtggtgatgttttggtcatccatcagcttgcgggtcatcacactcaccgattgcggcgtgcgtcgcaggctgtgttcgcccttgccgatggtcaccgcgccggtggtgtaggagccgctgccttcggtggtggcgcccaggcgctcgccgttaatggtggtggcgcccaggttcagggtcgagctgtcggcctgttgaggtaacagtaaccaagcgttcgggccctggctctgagcctgcaagccctggccttgaagcagtcggctcagggcctgttgtggctccagggtaccgctcagcccatcactgcttttgccggctacgctgcctgcgtcatacgacacgctgataccggcctgccgtgcaaattgatcgagggcgccggccagtgggccgggggcgatattccaggtgcgcgtctggcgttcgccgccggttggctgggcaccggcggtatacggaagggcagtggccgccaggcaggcgccgaggagggtcgccttgatggcgtgcctgagaggtgaacgcagggaggggaacgcttgcatgaccgcgggatgctcctgaaggaagtggacaacacgggcctgttgatcggcctttccttacaggtcgaatggcaatgagaattcacctcatttatttttggccggtcacgcgcgcgcggagacggtcacccagtaacggctacggtaggtcacatcgattgccagcgattgcgccaccaacttgagcacctggtcggtgtcgtccagttggtaagtgcccgacacccgcagccccgccacggcttcgctgcaacgcagcaacccattgcgatagcgacccagctcggccaggaagtcctccaggcgcatattgtgggcgctgatcacgccgtcactccaggcccatgggtccaggccgttgttgggggacgggcgaatgccgctacgattgaacatcacctgttcgcccggcttgatcacttggcgtgcggcgccgtcatagcggtcggtaaacaccgccactgcaccctgttgcacggccagcaaggtgccttggggttcttcgcgcaccagcaagcgcgtgccgagggcgcgcaggtaaccatcgcgggtatgcacccatagcgcacggtggtcggccccggtattgatcaaaatttcaccctggcgcaggttcaccagccgttgttcggcgccaggagtaatgtcgacggcgctggcgctgttgagctggactttgctgccatcctccaatgctacccagcgccgctcgccagtggcggtgcggtagtccgccattaaggcgggcaggggcgtgtagtcgcggccaagccaggctaaacctgcggcgccggcaaacagcccgagcagtttcaggctttcacgacggctgatgtgctggcgtgcgccgtcgagtgcatggcgactgacatgcgctggcaagtggttgaaatcgtcattcagggtggcgacccgatgccaggcctgttgatgcgcgtcgctggtgtgcagccactgttcaaaggccgcggtgctggcgtcgtcggcggtgttatagcgcaacttgatcatccactggatggcctggtcgaccaggcgcgagtcaggagtcggcatagcgcaaccggtaacaggcgtgcagcgccttggacaggtcgcgttccaccgtggccttggacacgcccaggcgcaaggcgatctgcgggcaggtcaggccgtccaattgggccaacaggaacgcctcgcgtaccctcggcttgagctggtcgagcagacggtcaatgcgttccaggctgtcgaggatcagccgccgtgtttcttcgctcggcacctccatttgcgcaaagtgcgccaggctttccaggtaggcgcgttccagctcgcggcgccggtattggtcgatcatcaagctgcgtgcgatgctgctcagataagcgcgcggctgctgcaaagtctgttgctgacgcgcgttgagcaggcgcacgaaggtgtcctgcgcgaggtcagcggcgcgctcatggcaacccgtgcgccggctcaaccagccccgcagccacgaatggtgggcttggtaaagctggccgatggcagcagggtccagtgggtgatcgctcgacatggtcatcctggcgcagcaggcttaattgataatgtttcgcattctagacgttggtcgtggcattcagcaatcactgggttcgctgcgtgagcaatgtatccagcacaattttttgtaggggctggaagcaccgattaatctgcagtttttgcaggtggacggttcaagcatgatcagccttgtcacactcggcgttttttccggcgctgtgttgctgttgctgctgtcaccggggccgaacatggcgtttgtcatcagccagggtgtcacccatggctggcgcggcggtgttgcctcggccctgggcatcggcgtggccgacctgctgctgacggcattgaccgccatgggggtgacggcggtggtcgccagttggccgccggcattcgacctgatccgttatgcgggcgtgatctacctgctgtggctggtcttcaaaaccttgcaaaaacgccccagcctgggcgccgctcacgtcggccgcgtggcgttgggccgggtgtttttgcaggctatgttcaacagtttgctcaaccccaaggcgttgttgtttttcatggtgttcctgccgcagtttgtgcggcccgaggctgggcctatcgccttgcaactgatggtgctgggcggcgtgctgacgttgatcgcgagcgtgtttcacatgctattgggcctgtttggcggggcgctcagccgcttcttcgccaagcgcaccaaaagcgcctggctgcagaagtggggcttggcagcggtgctgacggcgttggccgtgcgcttggcggtgatgtcgcgtcctgcctgaatgacaggcgggaagccaagcaagtttctttgtggcggggggcccgacagccgacgctcatctaccagacaccccgcaatccaactgtgggagctggcttgcctgcgatggcggcctgccagccgacgcttctctacctgacaccctacgatccaattgtgggagctggcttgctcgcgaaggcggcctgccagccgacaccgggtatcagaccgagcacatattcattcctgcggtaacggccacctatttgactgaaagagatgcctttggccagctttgccacgactaccaggtcagtcgaaagactggctacgactggacagccgttgagcaccgagagaatcaaaaggagtttcgtacagcggactaggacttacctcacgttcaagcgttgaaaccggttcattcccacggaccttcccagtcgctgcaaattcagcgaccggacgtgagaaatccaacttcaccccagccgcgcagctgcccgcgcaacaatctccccgcgcactctgcgtgactccaccgtgcgcttgttggcttcctccagcacatgccggggcgccgtctccgggcggcctgagtcaaacggtggggccggcgcgtattcgatctgcagttgtaccagttgcgccgccgcttcgctgtacaactccgcggccagagtcagggcaaagtcgatgccggcggtgatcccgccgccggtaaacaggttgccgtcacgcaccacacgttcctgtacgggaatagcaccaagcggggcgagcaggtggtggtaggcccaatgggtggtggccttgcgaccgcgcagtaaccctgccgcgcccaataccaatgaaccggtgcacaccgaggtcatgtagcgcactgtctgtgcctgggccttgagaaaatccagggtttgcgggtcttccatcaacgggcccacaccggcgccgccgggtacgcaaagcacatccaggttcgggcagtcggcatacgtgatggtcggcgtgaacaccaagccggtgctggaggtgatcggtgccaggtctttccacaccaggtgcagtttcacgtctggcagcgaaccgaggacatcataggggccggtaaggtccagttgctggatgccggggaacaatagaaagccgatctgcaaggtcatgattcacgctccgaaagggatggacgtccttactgtagaagcctaggctttggcgaatacgccattgagcccactaatctcgccaatcatgccaaaaattattcatgtgctcgcgtttgagaatgcccaggtgctcgatgtcaccgggcctctacaagtgttcgcatcggctaacgatctggcgcgccaacgtggtttgccattgccctacgcggtcaacgtcattgctactcaggctgggccggtaatgacgtcggccggcctggcgctgctggccgagccgctgcccgccattgaccagccctgcgacacgctggtaatcgccggtggctggggggtgtacggtgttgccgaggacccgacgctggtgcaatgggtgcgtgataaatcccggcacacccggcgcatggcttcagtgtgcaccggggcttttctgctggccgccagtggtttgctcgatggttgccgcgtggccacgcactggacgcgctgtgaagaactggcgcgcaagttccctgcgctcacggtggaggccaatccgattttcatccagcaaggcgcggtgtggacgtctgctggcgtgaccgccgggatcgacctgtgcctggccctggtagaggatgacctggggcgtgcgattgccttggaggttgcgcgccacctggtggtgttcctcaagcgccctggcggccagtcgcagttcagcgtgacgttatccctgcaaaagagcgacagccgcttcgccgagctgcatgcctggatcgccgataacctgacgctggagttgagcatcgccacactggcggcccaggccggtatgagcgagcgcagctttgtgcgtcactaccgcaccgagaccggccagaccccggcgcgggccgtggaactgattcgcgtcgaaaacgcacgccggcaactggcagacagcacaacctccatcaaacgtatcgccatgcaatgcggttttggctgtgaagagaccttgcgtcgcagctttctaagggctttgtcggtgacgccacaggcgtatcgggagcgtttttcaccgctccagtagttccagcaaagcgtgaagcgtgacctggggcgcttcctggaaaacattgtggccaacgccgggcaacacctggcggcgataaaagccgctgaagtgctccacatcgtcatccacaagcggcggcgggcccacaccgtcgtcggccccgcacaacgaaatgctcggtaccgagatcgccggttgtggcaccagcgcctgctcgatggattccagcgcgggatcacccggcgcatacatgaagcgatggcgatacgaatgaatcaccacctcgacaaaatccgggttatcaaacgacggcgcggtcagggcgtagcggcttggcccttcggcccaggacggtgaccacagcgtccagagcaattggcagagttcacgccggttggccgtcaaaccatcgaccccgcgctgggtgtgaaagtagtactgataccagagccggtgctctgtctcaggtgcccgaggtttgagcgactggctgatggcctggatgttgtagccatcgccggtcaccaggccgcgtacccgctgcggccacagcgccgccacaatacaggcggcgcgcccaccccagtcaaagccggcgagggtagcttgcgggatggccaaggcatccatgaagtcgagcaagtccttggccagcgccgcctgttggccggagcgcatcacttgcgtgttgataaatcgcgtcgggccataaccgcgtaaatacgggaccagtacccgataaccgcgttcagccagcaccggtgcgatgtcgtcgtagccccgagggtcgtaggggaagccatgcaacaggatcaccggttcgccatcgacggggccgtgggtttcgtaagccacatcaagcatggtggtgcgcacatacagcagtgcgggtggggtggtcagggttgccatacggttttctccccgctgagcttgcggtccaggaacgttgccgcactgatcaatgccaaatggctcaaggcctggggcgtgttacccaggtgccgggcctggctgtcgaactcttcggcgtacaaccccagcgggttggcgtaacgcagcaactgttcgaattccagatgggctttttcaacttgcccggcgcgcgccaggcattcgacgtaccagaacgagcaggcggcaaacgcgccttcgacgccttgcagcccatcgatctggctgtcgtcattgcggtagcggtagaccatgccgtcacgcaccaggcttttctggatcgcttgcagtgtcgacagccagcgcgggtccgtggcggcgacaaagcgcaccagcggcatcaacagcatcgaaccgtcgagggcggtgctgccgatatgctgcacaaaatgcccgcgctcttcgttccagaagttcgtccagatgtcggcgtagatcgcctggcgcgtctggtcccagcgtgcgaacggcgctggtagtgagcgtttggaggccaggcggatggcacggtccagggccacccagcacatcaggcgtgagtgcaggaagtgatgctgctcaccgcgcatttcccagatgcctacgtctttgtggttccagatctcacacacctggtcgaccacttccaccgtgtgtttccagccttggtgggagatggcttcgccgtatttgttcaccaggtaaaccgcgtccatcagttcgccgtagatatccagctggatctgatcgaacgcctcattgcccacccgcaccggttgggcgccgccgtggccgctcaagtggtcgagggtggtttccgggagttcctggcggccgtcgatgccgtacaggatgttgatcttggtcggctggccgcagcagtcgctgacccggcccctgagccagcgcatgtaggcgttggcttcctcgacgaaacccaggcgcatgaacgcatagacggtgaacgaggcatcgcggatccaggtgtagcggtagtcccagttgcgttcgccgccgggcgtttccggcagcccgaacgtggcggcggcgatgatggcgccgtgtttgcgcgaggtcaaaagtttcagcgccagggccgagcggttgaccatctcgcgccagcgcccgcggtagttggactggctgatccagccgcgccagaatttcaaggtgcgctccaggtagaggtcggtacagtcgttggtgacgcgcgcatcctcctggccgccgaggacaaactcagcgccttcctcctgggcgagggtaaacgtggcgagggcggtgttgtcttgcagggtcagcggctggctgccgatcaggcgcaggccgggatggccgctggcggtgaacactacactggcagcgtctgccttcgcttcggtggcggcccgggcatagtcgtggcgcacggcgcagctcaggtggatagtcgccttgccactgaccacccgtacccgcctgatcagcaaaggcagttcatcgacgttttcgctgacggtcagcaggtcggtgatctccaccactgcttcatcgctcagccagcgagtctgcaacacgttggtgtcgggcaggtagatctgctcgcggcgggcgttgggcaggtccggggtaagctgaaacgtgccggcctcgggcgtgtcgagcaatgcgcagaacaccgaggggctgtcgaattccggccagcagaagaagtcgatgctgccgcggtcgttcaccagtgccgcgctgcgcatgtcgccgatgatcccgtgggcatcgatggcgctttgaggttcgttcttgaaatcaaccattgccacgaaactccggataaaggctcatgccgccatcaatgaacagcgtgctgccaaccacataatcagaagcgtcgctggccagccacaccacggcattggccacgtcttcgacgtcaccgacacgaccataaggaatcaatttaagcagctcttgttctgccgcgccttcggtggccgcacggttgatcgccgtacgaatggcccccggtgcgatgccgttgatacggatgcgttgctcgctgacttcctgagcgagggtgcgcatcagcatctccacgccgcccttggacgccgcgtaattcacatgcccggcccaggggatgacttgatgcaccgaactcatatggatgattttgccggcggcccgtgacacaccttcgcgaataccctggcgattgaagatacgcaccgccgcccgtgcgcagaggaactgcccggtgaggttgacgccaatcacggtgttccaatcctcaagggtcatatccaccagatgggcatctttttgcaggccggaattggccaccagaatatccagatggccgaaggcgtcgagggtttgcgcgaacaggcgttcgacatcggcctccttggacacatcgccgccaatcgcaagcgctcggccgccgttggcattgatctgcgcggcgagggcctccgccggtgccgcctgggagttgtagttaagcaccaccgccgcgcctgctgcggccaaggctttggccgcgcccgcgccaataccggaactggccccggtgaccagggccacttgttgctgcaaggaaatctgcatcgcccacccaccgttttatgagagtccttcttgctgactggcggcggggagcggaagttcaccccctggcgcttacgcccagcgcgggcaaaagcgcgactttgtcgtatgatgctgaaaataaagggcaatacaggaagcgatggaatgcatgcgtgggccgatacccgagggacgaaactattactcagcggcgtattagccgctttatcactgattcagacagccttgtgcgtcgccgacagcagcaatggtaaagcgctgtatctacagcgctgtgccgtgtgccatgggcccgatatcaaaggcacggggccattggctaaaaaaagtaatccgccgacccccgacctgacaaccgccgccttcaagaaacgactccatgattatccgggcgttatcgtctcctcggtcatccttcgccccaacggcaatctgatccccaagacgctgcaagacaatggcgtaaagatcgcgccacatgcctggagtgttaaagactttcgcgatttgcatcaatacatgagtgaggtcatttcgaacaaatagtgagtgggcgataggcagcaattgccccgcttaataggaagcattactattcacgccccgccttcccagtgctcccgtgatgactcctcagccgccccgcagaacaggctttttcgagcactacgaagagttgatcggcacctggacacgtcgcctgagaaaccgtcagcaggccgaagacctggcgcacgacaccttcgtgagggtgcttgagtccgctgcctgcgaggtggcgcagccgcgcgcctacctgcatcaaaccgcgcgcaatattgcggtggacgcctaccgccgcgaagaccgccgcgaggcgttgacgcagcaggcagttgatcacagcacgcctcacagtggcgacccggagcattacatgcacgcgatccagttggccgacgccgtcgagcgggcgctggccgagttgccgctcaactgtcgcagggtttttatctggcagaagatcgaagggctcacccagcaggaaatcgccacacgcctggggctgtctaaaaacatggtggaaaagtatatgatccgcaccctgcggcatctgcgtgatcgtctggatgcgagcgcgccatgaccggctttgaaacaggatcttccacgatggataaccgtgtccgtgatgaggccgcgcagtggtttgtgcgcctgcaagacggcccattgagcgcccaggaacgtcaacgtttcgatgcctggcgtggagcgcagcccgcgcatcagtacgaaatcgatgtgctgcaagggctatggaacgctacggatttactgcccaaggcccgcttgcaggcgctgggcgatgccccgaccgagcgccttgggcggcgtgcgctgctgcgttatgccgtggccgccagtgtggtcgccgttgcagtgggtttgagtgtattcagcgtgtttgagcctaagtcctacaatgccgaattcagcacgcaagtgggcgagcatcgccaggtgacttttcccgacggttccgtgatggacctcaacagccgcagcgtggtcgcggttcactacgaaaagggctggcgaggcgtggagctaaaacagggcgaggcgatgttcagcgtgcaacatgacgctggccgcccgtttgtagtcgccgccggggcagggcaggtgaccgtcaccggcacgcgctttgatgtgcgcctggatgcggaccagacccgcgtggcgttcgaagccgggacggtcaaggtgcagggccaggcgtccgatcacattgtcacgctcaccgccgggcatggcacccatgtcgatcccctaggccaagtggcagcggcctacgcggtaaaccctggagaactcaccgcgtggcgcagcggtaaactggtgttcaacaacgccaccctgagtgaggtggcgcgggaggtgtcgcgctaccgcgagcaaccgctgcgtgtcagtacggcagcggtgggcaacctgcgcctgaccagcgttttcaaatccagcgacaccgacgccttgctcaaggccttgccccacatcctgccggtcgccttgcgcaccttgccggacggtagccaggaaattatttcacgctgacattcaggtttttttcgagttcttcgtcttctcctgcaactgcaactggtttgcattaacggccgcgcatgcttgcgatcacaggactaggttcgacgtgaaaaaactcgccatccacaacaataaaatctctcgctgggcgcccttggccctggccgttgccatcagcaccgcacaggctgtcgaaggcatccacatccgtgcccaacccctgggcgcagccttgagccagttgggccagcagacctcgctgcaagtgttcttcagccccgatatggtggccggcaagcaagcccccgcggtcgatggtaacctctcgcccgaacaagccctgcgccaattgctgcaaggcagtggcctggattaccagattgacgccggctccgtgaccttgcgcccggtgatcaacggcaccggtgaagccggctcgccgctggtgctgggtgtgaccgatatcaaggtggtaggcgactggcttgccgacgccgatgccgaagtggtgcagaaccatcccggcgcacgcacggtcattcgccgcgaagccatggtagagcagggcgcgatgaacgtcggtgacgtcctgcgccgcgtgcctggcgtgcaagtgcaggaatccaacggcaccggtggcagtgatatttccctcaacgtcggtgtacgcgggctgacgtcgcgcctgtcgccgcgctccaccgtgctgatcgacggcgtaccggcggcgttcgctccctacggccagccacagctctcgatggcgccgatctctgccggtaacctggaaagcatcgacgttgtccgtggcgcgggttcggtgcgttatggcccacagaacgtcggcggcgtgatcaacttcgtaacccgtgcgatcccgcaagacttctccggggaagtcggcaccaccctgcaaacctccgcccacgggggctggaaacatgtggagaacgcctttgtcggcggcacggccgacaacggtatcggcgccgcgctgctgtactcaggggtcaacggcaacggttaccgcaacagcaacaacggcaacgatatcgatgacgtgatcttcaagacccactgggcgccgaccgatcaagacgatttctcgctgaacttccactactacgatgccagcgccgatatgcccggcggcctgacccagaagcagttcgatgccaacccgtaccaatcggtgcgcgactgggacaacttcagcgggcgccgcaaggacgtgtccttcaagtacatccgccagatcgacgaccgcacccaggccgaagtgctgacttactattccgacagtttccgtggcagcaacattgccaaccgcgacctcaagaccctcagctcctacccgcgcacctactacaccttcggcatcgagccgcgtgtgtcccatgtgttcgacctggggcccagtacccaagaagtcagtgtgggttatcgctacctcaaagagggcatgcacgaggaggccagcagcctgaatctggtcaacaacgtgccgacgccgggcgggcagagcgacggccacgtataccaggaccgtactgggggcaccgaagccaacgccttctatatcgataacaaaatcgatatcggaaaatggaccatcacccctggtattcgcttcgaagacatccgcaccgaatggcatgatcgtccggtcgtggccctgaacggcaagcgtaccgaggaaaaacgccgcgaagtccacaacaacgaaccgctgccggcgctgagcgtgatgtaccacgtgtctgacgcatggaagctgttcgccaactacgaaacctccttcggcagcctgcagtatttccaactgggccagggcggtaccggcgaccagacggccaacggcctgaacccggaaaaggccaagacctacgaaatcggtacgcgctacaacgacagcgtctggggcggcgaagtgacgctgttctacatcgacttctcggatgaactgcaatacgtcagcaatgacgtgggctggaccaacctcggcgccaccaagcacagcggcatcgaagcatcggcccattacgacctgtccaacctcgacccgcgcctcgacggcctgaccgccaacgcgggcttcacctacaccaaggccacctccgaaggtgatgtgccgttcaagggccgcgacctgccactgtattcccgccaagtggcgaccctgggcctgcgttacgacgtcaaccactggacccacaaccttgacgtctatgcccagtccggccaacgtgcgccgggcactggcaccacctacatcacccaaggcactgcggatggccaatacggtgatatcccagggtatgtctcggtcaacgtacgcagtggctatgactttggcgcgcaactagcgaatctgaagttgggggtgggcgtaaaaaacattttcgaccagcagcattacacgcgctccagcgataacaatgccgggttatacctgggtgagcctcgcacgtttttcgtacaggcaagcgtggggttctgatctgtagtcggtaggaacgatcgcaaccccagggttgcgatttttttgcctgggtcaagcgctctgttcactgataatcggcaggccaccctctgtttcctacatcgcccccgcacatattattgctggatcaggaactgattccgacgcaaaaccacacatgggaaagctgatgggcttcgacattgcgttggagcgacaagctgaaaatcgcccactgtcatggagaaacgtatgtcggtatcgatgtcggatgcacccgtctctgcgtcatcaacgcctgacctctcaccggccaatgccaaggccgagatcaaaaatacccgccaggcgcctgctacgccttccttcaatggtcagcaggctgcccatgtgaattttcaaaccggggacagcaaggccgggcctgtattcagtcatcaccagtcgccaaccaccgcggcagatgtgcttgggcatcaccacaacccgccggccatgcagaacttcctgagccaactcaagcactggatcagccactggttctctgggcatcggccacccatgcatcctggttgtgggcatccgccgccacggccgaacccaggttgcagcaacccgccacccaggcccaatcccattgagagcaatccaccgccacgacccgacccgacggccggtcgaccgtatccacccgcgcccggcaggcctgatccacagtactccctgaggagtagtgaagagctggcgcagcaactgcgtgacagcttcaacgccttcagagaccggaagaaccctcgttccatcagtgttgacagcattcttgcgatggcgaaaagagggtactcgcctaaccccgtcatgaacgagaacattcgcctggccaatgagctgctacggcgtccggagctgatggccgcgttggaccggcacggttccacgggcgctctggatggccttatcgaccggcacagcctgaacgcggtgatcaaaggagaaaactacttcaaatacaagaccgacaaggaactggccggcgagctgcttgagcatttcgacgagttgaagaacgggagcggggggccaagcctgaaaatccgtgacctgaagaagttggcccgccagccgcttaccggcgacgcggccaaggaccatttgattcagctgtcccaggaaatactcaagcgcagtgatgcgcttgagcggatggataatcgcgccagtaaagatgacgacggaaaaatcagccgtacaggactgtacttgttgtcccgctgatcgttcttcggcgccgcctctcgaaggcggcgccagccctatatgtttcaaggaacgaatgacgcccgattgccacataggtggtatgcggttgtgatttggcacgccgtttttcagtttccaaatgagggaaacatatgacttcaacctcgtttaattccccaaaaaccggccctctcgagcttttgcacgctacccagtcagcgaaactgcagatgtgtgaggagcgcgcaccctcactaaaccttccctttgcgtcgaccgaatatgaggccgaggcgaggcgcatgaaggcttatgccggcgagcgcaaattccaggcacccgtttcggatgatttttcccggggcctgctggcggactggcagggggcggggggcgacggcgattcattgaaggacaccggcttgatcaacagcctggcaggctggtggcgtaggctaaagctggattgatcacggttttacatgctgtcattggtattagtcgttcacgcggaactgtcgagtccatccaaccacacatgaggtgcctgcctgagtggagtctattcgttgattttgcccatcgcggcacagatcaccctgcggatatacatctgaaaagagttggagaaaacccatgacaatcgagggtgtagtaccttccggacgaccgctcccccccgacctgccggccgtacaatcaaccacgccatcaccggccccggccgccccccctgaaacctggcatgaaacctcttctacgcctccggctggaggtccgcacaagccctttctgttgcgcgcaaccttgtccgctctgcgttatagagatttgcagaaccctgtgacgcaacggtccagcggtaccctgccgggtgaaaactcaacggacaaccagttggctaaagctttggaaaagtctttcggcctgctgcactcgttcttaaatgatggccgcttgacctggctgtccttgcagcggatcgccgctcaccctttgggtgaaagcgaggcgttggacagcgcgatccaggtcgtcagggaaattctcaagcgcccgcggttaagcgacgcgatcttcagccgtgacggcgatatcacgcgtgacagcctcagtgcggcagcccaggctttgcagggcaacagctctgccaacgtgttcagccaggatccatttcatgcccaaggcaatgcccaggtggtggaggcgctgcaaagcgagtttccgaacctgagagacaaggccatggatcgaacctacctgtttgaaccgtatcagtaccttgaaatagccaagcttcgggtggttatgcaagacccgtatgaggttgatcagcagggcgagcctgtggtggatacgtctacgggcatgcctaagtccaagtacagcgaactctgtgtctacacggcgaagaacattatcgagcgtccgggtttgctgccgtcattggagcgtgccagcggcgcacgactgtttggcccgcctcacaaggaaggctggctcagcaacaaaaacctcgaacgctggcgggagcaggatgatgcccgtaaaacgcgctgaagtctggtttacaccctgaggatcttgccactgatggccactgccgccagcaacactgcgaccaagacgaaggcgatattcaagctgctgccatgggcgatgaaaccgatcatggcggggccggcgagaatgccggcataacccaatgtggtgatggccggcaccgcaatatgttccggcatgactgtttgtttacccacagcggtgtacagcaccggcacgatgttcgaacaaccggcgcccaccaaggcatacccgagcaacgcagtttcccaggccggcaatagcgtcgccagaagcaacccaccacaggccagcgtgccaccgatcacgatcactcgcgtggcgcccaggcgtcggacaatggcatcaccggtcaggcgtccagcggtcatggtcaaggcaaatgccgcgtagcccaggccggcgtaagcctcatccagaccgcgctcagcactcaggaacaccgcgctccaatccagaacggcaccttcagccaggaacacgatgaaacacagacaaccgataaaaaacactacgccatggggcaccgcaaacgccgggcccgagctctcgctgccataaggcaacaggtggggtgcggccttcaacagcgccacaaccatgataacaaccaccagcaaagtggcctgcagtggcgacaggcccagccccagcaagccggcaacccccgctgcgcccacaatgccccccaggctgaacagaccatggaaacccgacatcatggttttgccgctggcgcgctcaacgatcaccgcttgcagattgacggtggagtccacggtgcccaggcccgcgccaaacaggaataaacctgcgatcaacaacgggatcgaactgacggtggccagcatcggcagggccaggcagatcatcagtgtccctgcggtcagcacgcgtcggcagccataacgcgaggccagtacgcccgcaaccggcatcgcgatgatcgaccccatccccaggcataacagcagcaggccaagcgtgccttcgttcagattcgcgcgcgccttggcaaacggcaccaacggcgcccaggccgcgataccaaaacctgcgataaaaaaagcgatgcgggtcgacatctgttccagtcgcccgggaaccacgggggcaggggtgggaatggcagtcatgaaaaatccttggtttagcgttcaacgaacgatgtccggcgcgacatccttgcacatcaggccctctcgagcgagccgggttcccttggtgttacggggtgcgaggcaattttttttacaaacacggaacgctttgaccaccggtgaccacgtagaaatgatcgagcctgtaggaggtgggctggaaggtgtgtaatccctgcgggagtggctgaaccccaggtttcttgcggcggattaccaccttccagatcactttccacagacttggcgttctgcaatatgccgcagtcccactggtagagacgcgaggcaatatcagtgggcaattgccacgtccgtgcgctaagaggggcattgctgtaagggaggcctgacgccccgcgatccaaatgtgagagctggcttgcctgcgaaggcggcctgatagtcaacatagttggaccgggtacatatccgttatttaggttacggccacttagggttccgctctgacagcggctcacttttgaaaagccggaatgccggcccaggcaaaagtaagcaaaacgctcttgccccaccactcggcacctcgcttaggctcggtgtgcccgtaatccgccagtgatttggggggccgccgccacgcgccatccatggcgcggggcggctaaaccggcatccctgccggtttacccccaaatccctgtcgaattccggccagcgtggtttgacggggcgccgaagatcaaaagcagagcaagatcaagagcgactcgcttcgcatcgtggttacccatggtcaggagccaacacttgtagcgggacagggcgactaaaaagcggaaacgactgtcgcattaaataagtgtcagccgtttccttaaaatttaggtatgcagagacaaactgtagtcagaattttcttcatgccgttagaaaatttttttggctgtatacattctgtaaaagacacttccatcttcgctgtacgaaacttctgttttattcaaaaaggcccgaaaagtgcctgggatcgctaagcttgagcgtgttcaggtgctttttttcgcaattcaaatgggtgttggggcgagagagagtcgttcaagagaaagttgatggcgggtaacaaaggatggttaacggggttgttttgtcgcgtttcaagttagttctttcaagcataaatacagaacttcaggtagtggcgttcaaaggcagcgaagccctcgatcagccttactttatacacatgcagttagtcagcgaagatccttcccttgacctggaggcgttgcttcatcaacccgtttatctggctttcggcgaagcagaccagggcttacatgggcaaatctacgccatcggtcgggatgatcccggtacgcggctcaccctttatcacctgacgctggccccacgcctggcatcccttgcccatcgttgcgaccagcgggtttttcagcagcgcagcgtaccgcagatgattgccgcggtcctcgaacaccacggtatctttgccgacgcctacgcgtttgagttggggccggtggtgtatccaccgcgcgcattttgcgtgcagtacagggagtccgacctgcatttcatccagcggctgtgtgaggaggagggtattcactaccactttcgccacagcgcggagaatcatctgctggtgttcggtgatgaccagacagtatttcgacggttgccggtgcagcgttattgtccctcggctgatccatcgcttgggcccccggttgtccaacgtttcgaccggcgcatggtaacgcgcagccggcgcaccgtacgccgtgactatgactttgagcacccttcgtttcgcctgcatgaccaagccggtgccgggccggtcgatcctttggaagactatggctaccctgccggctttacgggccatgcacgcggtgtgcagctggtacggcgcggcctggagcgccaccagcgtgatcgccatcgggtactgggcaagagcgatcaaccggcgttgtgcagtggtcactttcttgagctgtgtgatcacccggacccagcctgcaacgacttatggctgctgacttcggtgcgtcatgagggttaccagccgcaggtgttggaggagtcggtcgttgatgccaatgggttccaaggctatcgcaaccggttcaccgcaaccccctggcgcgcagtgcatcgaccggccctcaagcaccctaagccaacgatcagtggcagtcagaccgcgacggtaaccgggcctgccggcgaggatgtgcactgcgatgcttatggtcgtgtgaaggtgcgctttcactgggatcgcgcggaaaagggcgacgagaccagcagttgctggctgcgtgtggcgtccggttgggcgggtgatgggtttggcgccatggtcattccacgggtgggcatggaagtgttggtgagctttctggagggagacccggaccaaccccttgtcaccggttgcctgcccaatgcatcgcatctgccggcgtaccctttgccgcagcacaagacacgcagcgttctgcgcagccgcagttcgccgggcggcgggggcgccaatgagctgtaccttgaagaccgacgcggcgaagagctcatttacctgcgcgcccagcgtgacctggagcaacgggtggggcatgacagtcgcctggaggtagagggcgatagcctgactcgcgttggccaaagcctggtgatcgaagccgggcagcaggttcacctcaaggccggtgccagccttgttattgaggccggtgcgcaactgagtttgaaggctggcggggaacatttggtgatgcaggctggcagcatctcaagcagccagcccatcaccctgggcggttcgccgtctgcataccgctcgatgaacgccggtgtgcaaatctcagcagggcaaggcgtcatcatggacttggccaagcaactgggcgcggacttttgccctctgtgtgaatgctcccgtgaaggcctgtgcgatatcgcggggagggcggcttgatgaacagcttgccctatcgttggatggcccaacagcagcagagcgggcatcaactatgccttgtgcttgatggcaaccacgaggctcgccaacctctgctcgccggtcgcgcgccctcgcactattgcaacctttacagcgagaccgctgtggcgcagttggcgagttcaggcccggtcatcgtgttgatcgagcgaatgagtgaacccgccctgaccgacctgctgctacaccccgagtcgaactggggttggctcgccagcctgccggccagcgacctggcgggtatcgcgcgccattggcgcgagagactgctggtcgggccagtaggccagcaggcgctttatcgcttgcacgacaaccgcaccctggcccgtgcgttggcccatctgggcaaggaacattggcctttctacctcgggcctctgatcagcgtgtgctattggcatgaagatgattggcaccaccacaaaaaccctgcaccgggcgactacccggcgcctgagcccccgccgtggctcgacacacccaacccccaggccgaagccatcctgcacgccaatatcctgcgctacctgctggcggagcacagcgaagacctggcggcattggtcgaattccaaaaccccaggatttggctggcccaggtactggaacaagcgcgcacctggcggtggcgggagcctgcgcagctcgaatttttggtggttcgccggttggccgaggcgactggtagcagtgttactcattggcaaccgagggcaggcgaggcgcctggggagcattttgaacgagtggtggcgcagtggcacagggaggtagggagcggtgagtaaatggatgggattggtgctgctggtggctggggtgctttcgggatgtacggggagggcggtggagcgttttacgttggaggtggatttgccggcgcagtttgaacttaaaacggctgccaactaccggcccgcgacgggtgagacctgcaccttgcctcggcggcgaggtaaaagacctgagcggaaagtcttttttacagactacaagcctgtggcgagcagcgtgagttatgagctgccactgactgaaacggtagaaggttgtccgttggtcctgcgcagtgtggagtttgacttttatgcgaagtgggggacgcggagtatggatgtgggtggaaatttcgggagtatttctattcgagaccgtttggaggccgacctacctgggatgcccgagtcgggtgtgcaggaaatactggggcaatgtaaatggcactttcggacggtagggcctttgcatgcgattagaaaactcctgatctgcaattcgctggattcgatgggtaagttgcaagcgtcgcgggtagggggcgtggcgcaacggccgcaattacccggaaaaaagctgaggctggtgctatctgtcagcaaggatgagttacctgcctttgacgatagatgggtagcggtgccgggggggtggcggcgatgcagaggcaagagtttcgaagacctttttgcatattgcgcaggtaacaccacagactttaaacccataaaaatgccggacgggcgcgtatgcgacgtctatccaacatgtaaataacaaggaccaattcatgaagctggatgcatggaagcaagattttttcagtgaacgaatgcctgcttgcgcattgaaagggcactgggtgagttttcgtttggtcgatatgacgggcaatggaaaagcctatggcggactagccttttcggtccatgacagttcagggagacagtacgtcggtaaattgaatggtgagggttttgcccgtttgcaggatttctactgcggcccggttgttctcatgttggatgatttgtatagcgggactgaggagccgtattaccagctacgaacgcgccgaacctacaaactgcctatcaccgaacttcaaatgcgcgctgagcgaactttttttgctagtgctgacgacagacgcgttgaggagagtccggcctaccagcaagcggattggttttatcaggttgaagtaagcgatttggtacgccatagcgctcatctgcccctacctgcgtcgtcaactttgcgtcccaagcgtcatgcactgaaaatgatggccgacctagggttcggtccgcccgagccaactttttcgggtatcgtactgttccccaacaagcacaccgttctggaaatgcgacccctacgggccttgcgcccaatgttatccaccgaagacagcttatgtgccctgaacctctaccaactggcattgtttgctgcgttgagttactgcgattttgggcaggtccccgcagaaagcccatcagacgaagtgcggtttccgttagatccgagcgttggaaatttattcgctgaacagctttcggtgtatcacgaagcctggcgaattgatccgaagcaatcacaccgtttttacccgatctacgaagatgttccttactcccagcgtttcgaaatcctgcctttcgatcctgagttgtacccacaaaatcgcccggaactaaaggaagagcaggaatatcccgcacgcttgcactttttcgatgatgaaaaattcggcactgatacccaggctttcatcacccatcacgatgagatcatcctgatttctgtgcgaggaacggtcagtcgtgccgacgtattacgcgatgccgatgcccatcaggtgtctttcgaagacggtgtgggaaaagcgcacgatggtttttaccaggcctaccgggctatacgtgatttcgtactgcaataccttgatcagtttcacattggccagcgcatcgtaatttgcggtcacagcctcggcggcgccattgcattgctgttggccgaaggactgcgccgaaccccagacgcccactacaacatcctgctctacacctacggcgccccacgcgccgccgacgccgaattcaccgccggtgcctcaaccctggtccaccaccgcatcgtcaaccacaacgaccccgtccccagtgtcccggcgccctggatgaacaccaccgccaagctctggattcccggggccatcacgctattcagcaaccccgcacccggtggcctgctgttcgccgcagggctggtgcgcgtgggcggcaacccctatcggcatcatggtgagcaatatcacttcatgccgatcacgctcccggatggcagccactcttcagtgctatggaagcctggatgtgaatccatcgaggaggcaggttgcaaccgcgcattgcaactgcaaggcgacatgcccggtcgcgataatttgctgaggcaactattccaagccgaccagcacttcatgaccaccagctacgtccccgcagcctgggcgacattgcgccgctggcaacaaaccctggagagtgagggcccgctggtgacccagcgggagttcgagctgctcgaccgggccttcgaaggcatgcgcgagcaactgcgggccaagcggcgtgaactggctcagcggcgcccagccaatgatcgtagccatgaacccaccgatgccttgaacgcagagatcgaccgtttgcacaccagccgcgagcgcttggcaagcctacgctggcgtcgcctgcaagcccacgatgtctacggcagccatgcccgttctgcacatctgcaatcgtgcctcaaacgttggttcagccaccgcgagaatcgtgagccagcgcaatttgccagcatcccgccgccgtcccagaatgaacaggcacgggcgcaaacgctggatatcgactcagtcgtctaaccgacgcgattacataaactccacccgggccggttgccgtttcatcagcaccttgccgttgcggatcgagtacaacggcaggccctggctacgtatgacttcgtagtcgctgtcggccgacaggatcagcaggttggccgggcgacctgcttgcaacccatagcgatcgcccagggccatggccttggcactgttgtcggtgaccaggtccagggcgttttgcaaattgcggtaaccgagcatatggcagatgtgcaggccggcctccagcactcgcaggatattgccgttacccagcgggtaccagggatcgacgatggagtcctggccgaaacacacgttcatgccggcctcaagcagttcgttgacgcgggtgacgccgcggcgtttcgggaagttgtcgaagcggccttgcaggtggatgctttcggtggggcacgagacaaagctgataccggaatgccccagcaggcgaaacagcttggcgcagtaagcgttgtcgtaggagcccatggccgtcgtgtggctggctgtcacgcgggcacccatttcgcggctgcgggcttcttcggcgaggacttcgagaaagcgtgagtggggatcgtcggtttcgtcacagtgcacgtccaccaggcagccggtgcgttcggccaggtccatgaggaacttcaccgaactcacgccttggtcgcgggtgtattcgaagtgggggatgccaccgatcacgtcggcacccaggcgaatggcttcttccatcagttcgcggccattgcggaatgactcgatgccctcctgggggaaggcgacgatttgcaggtcgatcaggtgggtgctctcttcacgtacctccagcatggccttgagtgcggtgaggtctgggtcggtgacgtcgacatgggtgcgcacatgctggatgccatgggcggcgagggcctgaatggtttttttggcccgcgccttggtgtcttcctgggtaatggtggccttgcgttcgccccagcattcgatgccttcaaacagcgtaccgctcatgttccagcgcggctcgccagcggtaagcgtggcgtcaagatggatgtggggttcgacgaagggcggtatcaccaggttgccggcggcgtccaagtcgccggccatcagcgttggcaccccggtttgcgcagtgatgctggcgatccggccgtgttccaggtgcagatcatgcaggccttcacggttgcgcaggcgggcattgatgatgtgcatggtcaagttcctcttggctaaaaacaatcaggcagacagccgccagatcctcagggcgataccgatgtccaggcggtcatggcgcgtagtatggcgctgagcagcacataggtcagcgatgcggcaacaattcccaccaacggtgcgacccacggcgagttgaacgcgaccacggtgcccaccccatacgcgatcagacctggccaattgaatgccggtaagtgagcttccgccaagcgcggatattggccgcgatagcgatagaagaagtccgccatgatcacgcctcctatcggtgggatgaccgtgcccagcaggatcaggtacggcaccaacaggtcgtacatgccgaacaaggcgagcaaggtgccgatcaccgcgccggccagggtcacgctcttgcgacgctgggtacgcagcaggttgcaaccggcgacggcgaagttgtagatggtgttgtcctgggtgctccagatattgagcagcaacatcgccatcgccgccgtggcgaaaccttgcagcagcaagacttccaccacatccggttgctgatagacgatggcgccataggccccgatcagcaccatcaagccgttgccgacaaaaaagccgatcaggctagccagcaccgcaaccttggccgagcgcgaaaaccgtgtccagttggtggcctgagttgccccgctgacaaaggtcccgaacaccagcgtgatggcggtggacaagtccagttcagcgctgggcaccactgccagcagcccctccagcccgccgaccttcacggtggcgacccacatcgacagcagcaacagaagccccatggccggcaccgcgatgtaggacaggatttccaagccgcgataccccacgtaggcggtggcgcagaacaataagccaaacaccagcatcagccccagcacactgcccgggctcaactggaaatacttgcccaataccacggccgccgtggccgtgccccaggcataccagccgatctgggtaaagccgaggatcaagtcactgagcttgctgcccacttcgccaaagcagaaacgccccatcaacaccgagttcaagccgctcttgaacgcgatgtaacccaagcctgcggcgtagatacccaacaacaggttacccaggaccacgacgccgagcatgtcgatgaaactgaacgcgacccccagcttgccgccggcgaacatggtcgcggtaaaaaaggtgaaccccaacaacaccatggccgtagaggccagacccttgcgcgcgtgcaaggggacttcgctgagagggtagtcgttgccggggtcttgctgcgtcatggggctgctccctgagtggtggcccaggtcgcgtgcatcctgcgtgccaacgtagatgcgggcaggtatgcgctgacgggagcaagccctttataaggccgccccctcccaatcagcgcaaaagcagtgcagcggtgagccaaactggctcagtcgaacagcgttggcatgaagcgcatagtgggtctcaataccccttgcagtcacgcgtccccatcagtccatcggtgcttcaaagatggactcgatgggctgctcgaacaccttggcgatcttgaacgccaagggcaagctcgggtcgtagcggccggtctcgatggcgttgacggtctggcgcgacacacccaggcgctctgcaaggtcagcctgggaccagcccagttcggagcgcagatgacgcatttgattgttcactgatagcgccttgaaccgatgatcgtcgccacacaccagacgccgcccatgatcggccagaccatgaaggccgacatccgcgggaagccagccgtttccagaaaaccgtagctgaaggtggtcagcgccgtgcagacaaacgccaccgcaagcgcttcgagctggatcttgcggcccatttcatccatggcgttcagccgccggataatcgacaccgccatcgcgatcatcgggatgacgggcagcagtgccagggcgattttggcgacgccgtcgggcatcgacgacatgtagacgctggaaaccaccacgcacagtacgtacaccaacaaaatgacagcgaactccatcgggaagcgtttgggtgacatgatcatctccataagtaaagggtgctttacattaggtggtggtcaattcggtgtcaagcttgctttacatcgtggtaggcaggcattaaaaaaccacccgcaggtggttcttttcaatacttgatcacttactcgccgcgatagatgcagccactggtgcaggtctcgtggatacggatcgcactgagttccggcagcaagggtttcagttcattccagatccacttggccagtacttcgctggtggggttttccaggccgggaatgtcgttgaggtagttgtggtcgaggcgttcatagagcggcttgaaaatcgctttgatctccgagaagtcgcgaatccagccggtatggggatccaggtcgccgctcaggtggatggccaccttgaacgaatgcccatgcaggcgcccgcatttgtggccttccggtacgtggggcaggcgatgggcggattcgaatgtaaattccttgaagatttccacagtgttttcagctcggtcaggtgtctggcaggcggcgagtttaacagcttgatcaacctctgcgcataccgcccctcggccgcaggcacccatgcggtcaaagggctagcaaacggtcgccgagcttgccgttgtccgccaatgccaaaaactcatcccccagccgttggctctcgctcatggcggtttgccaatatttgttgcggccagggttatcgcccataaagcgcttgaagtcgctgcggtctggcagcttgccgtggggcaggcgggccaggtaatccctggacggcgccagcagtaacacatcctgcaagccttgctggttgctgcgtcgccagggcaggcccttgtcgaaccagccggggatgacccggtcggtaaagtgcgggtacagcacgatgtcatcgccgtggtaaggcaggtcgaggtggtaatccagcaggccgccgtcgcggtaggtgccggctccggccccgggcaggtcgcgcacgccttgcatcaccatggggatcgagccggacgcgagcaacgcctggcgcaggttgcccacgtccagggtgaggaagcgcgaggggaaatccttcagagggtgtaccggtggcgcctgacgcgggtcgtggatgatcagccgctcgaaatgccgcgacagccgtgcgcggccccgcaggttatcggcaatcaccgacgacaggcccagccccagccgcccacggtggtcatcggcgagcaagccgtggctcttgaccaccatgatgttcagccgatagtcggggttgtccagcacccgcgcatcgcgcccggccagcaggtcgtcgagcatgcgctggcagctctggctgacttgggccatggtcacgcctttggcaaagcgctgctcgttgtacaggcggcccaggtcgagcaagccttgcaccgggtcgggcaggcaggcgctggcgaaccgccaggagccgatggacgcgccgatcagcgcccgctcgcgcggcgcacggcgtaaccagtcaccgaacagcgccaggtcgagcccttggatacccagggccttggggccgccggccgcaccggggaggatgcccacgtcggcaggcgcaaggccctgctcgcggaggcgggtgaaggcgcgtttgccggccttgagggtcaaggccgggaacttgatatggatggcggtcataccggtctctgttgaggcgagcggggcagtataggaaatctcgcaggcagtgggaaaaatggcttaaccggaattgccatggtggcaattcagtttcagttaagttgcagcgcgtaccgtggccgacgtaggaaaacatcatgtaacggagacttatcatgaagcgcctcactgccctgggcgccgccgctatcatcctcgttacggcgaccccggccgccgcattggaccccgacaaaccactgatcgtgccggccactgttactattgtcgctttcgatcaattggaagccactgccctggcccttcaccctggttcgacgctgctgggcaccgacctggatgaggagtacggcaagtacgtctatgaagttgagcttcaagacactgacggcattgaatgggatgttgaattggacgcgctcaccgggcaggttctcaagaatcatcaggatacgtaatgaaggtaaatttacgcgtcggcagtcgcgtggcgctggtgctcatggtgttttgttccagcctggcggcccgcgacctcaaccaggacgaagccctggccttgcgccagcaaggcgtgatcctgccattggaacagctgttgcagcaggccatggcgcgataccccggctcacggctgctggaagccgaactggaaaagaaacacgggcaatacgcctatgaagtggaactggtgaccaccgagggcgtggtgcgcgagatcaagctggatgccaccaatggcgacctgatcaaagatgaggaagactgatgcgcctgctcctggtggaagacaacgtacccctggctgacgagctgatggccggcctgcagcgccagggctatgcggtcgactggctggccgatggccgcgacgccgtgtatcaagggcgcagcgagccctatgacctgatcattctcgaccttggcctgcccggtttgcccgggcttgatgtgctggcgcaatggcgcgccgccgcgttggccatcccggtgctgatcctcaccgcccgcgattcctgggctgagcgtatcgaagggctcaaggccggcgccgatgattacctgagcaaaccctttcaccctgaagagctgtacctgcgcatccagtcgctgctgcgccgctcccacggccagacgaaccagcccaccctgcaagccgccggcctgcatttggatgaagggcgccagtgcgtgctgcgcgacggcgccgagatccaactgacggctgccgagtttcggttgttgcgctatttcatgctgcatcccgaacagatcctgtccaaaagccacctggccgaacacttgtatgacggcgagaccgagcgcgactccaatgtacttgaggtgcacgtcaaccacctgcggcgcaaattgggccgcagcgtgatcgagacccgacgcgggcagggctaccgtttcggcgccaccccggcatgaggtcaatccagcggcgcctgagcctggggttgatcagcgtgatggtgattgtcggcgtggtgctggcgcaaaccagcctgtggttgttcgaggcaggtttgcagcgctaccttgaagcgggcttgcgcaacgacagcgaaaacctgctggtggcgctggtgcgtgggcccaacggtgtgcagttggatgagcaacgcctgtcgccggcgtaccaacggccattctccgggcattactttcgtatcgactttgccgatgtgcattggcgctcccgttcactgtgggaccaggaactgccccggcttcccacggcggggctcaagggcaacctgcaactggggcccgaaggccagcaactgttggtgctgcgctcggactacaagcgctttggccagtcgatttccatcagcgtggcccaggactacacgcccgtgcgcgagagctttcgcctgatgcgccaggtcggcctggtgatggggctggcggcgctgcttttggtgctgatcctgcaacgggtcaccgtgcgccgtgccttgcgcccgctggagaccgcacgtaaccagatcgcccaattgcaacaaggccagcgttcgcaactcgacacccaggtgccgctcgaactggagcccctggtggcgcagatcaaccacctgctggcgcacaccgaagacagcctcaagcgctcccgcaacgccctcggcaacctgggccatgcgcttaaaaccccgctggcggtgttgttgagcgccgcttccagtgaagccctcaaggatcatccgcagttgagccagttgctgcgcgaacaactggagcaagtgcagcaacgcctcaaccgtgaactcaaccgtgcacgcctggccggcgatgccttgccgggcgcgttgtttgactgtgaacaagagctgcccggtttactggccaccctgcgcatgatccacggcgaacacctggacctcggctaccaggtggcgccgggcctgcaactgccctgggaccgtgaagacctgctggaactgctgggcaatctgttggacaacgcctgtaaatgggcagacgccgaggtacgcctgagcgtcagcgagacgccccacggttaccaactgacggtggaagatgacggccccggcattcccgaggcccagcgcgaccaagtgttcagccgtggcgcacgcctggatgaacagagggttggccatggcctgggtttggggatcgtgcgcgacatcgttgaggtgtggggcggggtgttgcagttgcaggagagtgagctgggtgggctcaaggtgttgatcgagttgccacgccgctgacactgacacaccaccgctcaagatgtgggagctggcttgcctgcgatagcatcgactcggtttgcctgaagtaccgaggtgtctgcatcgcgggcaagcccggctcccacagaaaagccttgctacattcagaccctgaactgatccatcaacccctgctgctgattcgccagactgttcaacgcctggctgacccgcgccgactcattggcctgctccgacaatgactcggtcacatcgcgaatggtcgccacgttgctgttgatctcttcggccaccgcgctttgctcttcggcggcgctggcgatttgcaggttcatgtcgctgatcaccgtgaccgcatcgccaatctggcgcaaggccgtcacggcctggcccacctgttcgacgctgccctgggcctggcgatagctgttgcccatggagccgaccacgtcgctggtaccggtttgcaattgttcgatcaccaggcgggtttcttccaccgattcctgggtgcgccgcgccaggttacgcacttcgtcggcgaccacggcaaaaccgcggccggcttcaccggcgcgagcggcttcgatggcagcgttgagcgccaacaggttggtttgctcggcgatgccgcgaatcacttcgagcaccgagccgatctgttcgctgttggcggccaagccttctacctgggccatggcagtgctcatgtcggcggcgagctcgccaatgttgacggtggtgcggtcgataaccgtcaagccttggcgggtcgcctggtcggcatcccgggcggcttgggccgcttgggcggcgctgcgggccacatcctgggcggtggcgctcatttcgtgggacgcggtggccacctggtccacctggcggtactgctgctccatgccggcgctggtttgcgtggcaatggctgcggattggtcggcggtgccgcgggcgtcctgcaccgagcgtttgacctcggcaatgatcggctgcagcttgtcgaggaagcggttgaaccagccggccaattggcccagttcatcctgtttggcataggccaggcgccgggtcaggtcgccttcgccgctggcaatgtcttcaagcatgtgcgccacgccaaggattggccgggtcacgctgcgcgccatcagccacaccaggatcaagccgaccacggcggctagcaggcccaggcccagttccagcaaggtgcctttggcgttgtcggcgtccagctggtttttcagcgcttcggcgggggcgaccaggacttgttccggtacatccagcaatacgccccaggccttaccgccgggaatcggtgcaaaaggcgccagtaccttgagttgatggtcggtgcgcaggctgtgggtctgggtactgctggccaaggcactgatcaactgagcgccgctggccgggtcgacctgctccaggcgttggctgagtttgctggcatccgggctgtagccggccagtaagccggtcgggctgaggatgctgacctgggtctggccgtcgtacagtttctggctggcctgttggctgaccgcctgcaggctgttgaggttgatgtccaccgacagcgaggcgatgactttgccattgaccatcagcgggaacacgatgctggtcatcagcacgttctggccgtcgatcacatagaagtagggctcgatcacgcagggcttgagggtcgtgcgtgggcaagtgaaccaggcgttggccttttcaccgctggggccgatggaggtgtcggccatgtcgctctcgggcagcgccatcgaggtgattttccccggtgttggttgcgaccagtacagcgcgaaacggcctttgtcattgctgcccagttccgcctggttggcgaacagttcgtctttgccgtccagcgcattggcttcgaacaccagggacaggccgagcaggtctgggttggcctgcagggcggccttgacctggcgcgtcaggtcttcacgggtgtcgaaggcatcgagaaagcgcttctcggcctgttcgcgcaaaaacagcacctggcgggaaaagccatggccgtactggtaggcatccatgaactgctggcgaatgcccagcgcctgcacttcgccttgggcttcaatgcgcgactgggcggcttcgtcgagcatctgcatgctggacgccttgacctgctgcgagctctgcgccatgcgatacagcgacagacccaccagcagggtcacgatccccagcaggcacaggcccgccagcagggtgattttccattgaatggagagctgcctgagcgacatcgggacatccttacctgaaagcacatagagacagcgtatcggccagtgcctgtaattctttatctgtgcagagggctttgcctcaccacagtttttgacatgacagcccagctcctgcaaagtgcgcgccctctaataagacctctttcaagcctgcacgccggcagctgttcccatgggccgcgcgcgggcatgcctgtcttttttgtctctgcttgaggtaaccatgattaacgcagtcatcgccgcggtcggcaccatgctggtactcagcctgtcccgcgtgcatgtggtcatcgccattatcgtcggcgccctggtgggtggcttgaccggtggcctgggtatcgaggccacgctcaaggccttcaacggcgggctgggcggcggcgcaaccgtggccttgtcctacgcattgctcggagctttcgccgtggcgattgccaagtccgggctggcccatgccttggcggacaaagccttgctgctggtggaccgccaggacgccagcggtggcaaccacgtcaaatggctgttgatcggcctgttgtgggtggtggcgattgcctcgcagaacatcttgccgatccacattgcgtttattccgctgctggtaccgccgctgttgtatgtgctgaccaagctgcaactggaccgtcgcctgatcgcctgtgtgatgaccttcggcctgatcaccccgtacatgtttctgccggtgggctttggcaatatcttcctcaatcagatcctgctggccaacgtcgccaagagcggggtggatatcagcggggtgaatgtcacccacgccatgggcctgccggcgctgggcatggtggtcggcctgctggtggcggtgttgatcagctaccgcaaaaagcgtgtgtacgacctgaagaaaatcgagcgtgtcgagcaagtggcggtgcagtacaacccgctgaccctgctggtggccggtctggcgattgcctcggcgttcatcatccagttgtggctggactcgatgatcatcggtgccctggccggcttcctgatcttctcggtgtcgggcatcgtgcgctggcgcgacaccgatgacctgttcaccgaaggcatgaagatgatggcgatgatcggcttcatcatgatcgcgtcctcaggctttgccgaagtgctcaaggccaccggtgacgtgaactcgctggtgcaaacctcggcggcgttcatcggccatagccggggcgtcggcgcgttgttgatgctgctggtggggttgttggtgaccatgggcatcggctcgtcgttttccacggtgccgatcctcgcggcgattttcgtgccgctgtgtgtgcagttgggcttcagcccggtggccatcgtgtgcatcgttggtaccgccggtgccttgggcgacgccggttcgcccgcctcggactctaccctcgggcccacctccggcctgaatatcgacggccagcaccaccacatctgggacaccgtggtgccgaccttcctgcactacaacctgccgctgctggcgttcggctggctggccgcgatgacgctctgacgaggttcctgtaggagcgagcttgctcgcgaaaagcgtcaacgataacgcgggcaacctggcaccccgcagtgctctcaggttcttcgcgagcaagctcgctcctacagaaatcgctcacatggccgttaacctctcaagtcgccactaacaagagagaaaagccatgcgtctgagtttgaaggccaaagtcctggcccttgctgtcgtgccggtgttgttgtttgccgtggtcatcagcctgaccaccgtgtggattctgcagggccaggcccgcaacgaagtggatgaaacccgccagcgcctgctcaacgacgccaaggccaccctgcaaggttatgtcgaggtggccatgaccaccatcaagccgctctacgacgcggcagcccccggcgacagcgcggcgcgggcgcaggtggtcaagttgttatccaataccagctacggcaaagacggctatttcttcggctacgactccgaaaccatccgcctgttcaagggtaacagcccggacggagtgggcaaaagcttcaaggacaaccgcgaccctaacggcgtctacgtcaaccgcgacctggtcaaggtcggcaaggacggcacccactacctgcaatacagttcgacccagcccggccagaccgaactggtgcccaagctcggctataccgagtacctgcccaagtgggacatggtgatcggcacctcggtgaacctcgatggcatcgacgcccaggtggcggtggtgcaggctaaagtcgagacacgcatgcaaggcgtgctgctgagcatcctcggtgtggccgtggtggtgttgctggtgatcgccgccgtgggcatgttgctagccaataccatcttgcgtccgctgcacctgatgaaagccaacctcgatgacatcgcggcgggtgaaggcgacctgacccgccgcctggccatcaccagccaggatgaactcggcgacctggccggtgcattcaaccgctttgtcgataaaatccaaggcctggtgcgccagatcactgacatgaccgttcagctcaccgggttggtgagccaggtgtccgaccaggcccagcgctccgagcaggccatggaacgccagcgccacgagaccgaccaggtggccaccgcgatcaaccagatgtcctcggctgcccacgaagtggcacgcagtgcccagggcgccgccgtcgctgcgcagcagaccgacgccgaaggccaggccgccaagcgcgtggtggacggtagcatcgcgcagatccatgcgctggtgaacgacatccgcagcagcggcgtgtccctggacagtctgcagcaggatgtgtcgtcaatcgtcagtgtgctcggcgtgatccgctccatcgccgagcaaaccaacttgttggcgctcaacgctgccatcgaggccgcacgggccggggaggctgggcgtggctttgccgtggtcgccgatgaagtgcgtgccctggccagtcgcacccaaaccagcactcaggaaattcagggcatgatcgatcgcctgcaaaaaggcaccgaggcggctgtggacgctatgcgccgctccagcgatgccggcgacggcacctcggcccaggccaaccaagccggcgcgtctctggacaccatggcgcaactgattggcaccattaattcaatgaacgcccagatcgccagcgccgccgaagagcagaccgccgtcgcggaagagatcaaccgcagcgtgcatcagattgccgtagcggtagacagcgtggcggatgaaacccaactgggcgctcagacgtctcgcagcctggccgacctgggccagcgcctcgggcagttggtgggccagttcaggatctgatccattcaaccccatggcagggtttaaacgtcgcgcatcagcaagccaaagcgcaggtccatctgcgccggaatcggcacatacaccgtatgcccgtcccccggcgccacctcgatgctttcgcccttggcgttatgcaggctcggcaagtcaaagtgaaaattgccagcgggcgtcatcaactccagatgatcgcccagcgcaaagcgattcttcaccttcacctcggccaacgcgccacgacgctcgccggtcagttccccgacaaactgctggcgttcggaaaccgagctgccgttctggtagttctggtattcgtcatgcacgtggcggcgcaggaaaccttctgtgtagccacgctgggccagtgattcgaggttggtcatcaagccgcggtcaaacgcgcgcccggccactgcgtcatcgatggcctggcggtacacctgggtggtgcgcgcgcagtagaagtgcgatttggtgcggccttcgatctttaacgaatgcacgcccatctgtgccaggcgctccacatgctgcacggctcgcaggtccttggcgttcatgatgtaggtgccgtgttcgtcttcgaaggcgggcatgggttcatcggggcgattggtttcttgtagcaggaacacctgatcggtgggcgtgccgatgcccaatgtgggttgatattcatggacgatatcccccgtgacattctccactgccggcgtggcctggtatttccagcggcaggcattggtgcaactgccctggttggcatcgcgcttgttcatatagcccgacagcaggcaccgcccggaataggccatgcacaaggcgccatgcacaaacacctccaactccatggccggcacctgctggcggatttcgccgatctcttccagggacagctcccgcgacagaatcaccctgcaaatgccttgttgctgccagaacgccacgctggcccagttcaccgtattggcctgtaccgacaggtggattggcatctgcgggaagtgctcgcgcaccagcatgatcaaccccgggtcggacatgatcagcgcatccgggcccatagcgatcacgggcgcaaggtctttgaggaaggtcttgagcttggcgttgtgcggcgcaatgttcaccaccacgtaaaagcgcttgccctggtcatgggcttcctggatgccgagggccaggttggcgtggtcgaactcgttattgcgcacccgcaggctgtagcgcggctggccggcatagaccgcgtcggcaccgtaggcgaaggcgtagcgcatgtttttcagggtgccggcgggagcgagcagttcgggggcagttatcgggcgcatgggtgtgggtcgcaaaaaggcgcgagggtagtgctggagcgataacgggatattgacccaggtctaaataacgcgatctatgcttgttcgataaaccagggcactcccgcgtttggctgcggactaagcaacagggccgccatcggccctgtttttctgacatggaccggacatgaatcaaaccaacctgcaattcaagaccctgttgctgctactggccttggtcaccgtggcttttatctggatattgctgccgttctacggtgcggtgttctgggcggtgatcctgggcattatctttgcgccgatgcagcgccgcctgcagcagcgttttagctggaatcgcaacctgacctccctgaccaccttgacggtgtgcctggtgatcgcgattctgccggtgatcatcaccagtgcgctactggtgcaagagggggccacgctctacaaaaacatcgagagcggcaaactcgacgtggcgggttatatcgagcaattcaagaacgtcctaccgccgtacttccagcaattgctcgaccgcttcggcatgggcaacctcgaagggctgcgggaaaaggtcgtcaagggcgcgatgcagggcagtcagttctttgcctcccaggcgttcagcttcggccagggtacgtttgatttcctggtgagctttttcatcatgctgtacctgctgtttttcctgctgcgcgacggcccggaactggtacgcaaggtgcgcacagccgtacccttggccgagccgcaaaagcgtcgcctgcaactcaagttcaaccgcgtggtgcgcgccacggtcaagggcaatgtgctggtggccgtgacccagggtgcgctgggtggcttgatcttctggttcctggacatccccagtgccttgctctgggccgtgctgatggcgttcctgtccctgctgcctgcggtgggtgccgggctggtctgggggccggtggcagtttatttcctgttgagcggttcgatctggcagggtgtggtgctggggctgttcggcgtgtttgtgatcggcctggtggacaacgtgctgcgcccgatcctggtgggcaaggacaccaagatgcccgactacctgatcctgatctcgaccttgggcggcctgtcggtgttcggccttaacggctttgtgatcgggccgctggtggcagcgttgttcatgtcgtgctgggcgttgttcgtcgaaaccaagccgcgggtcaagctgccgctgccgtaacgttcaggcttctagcctgaagtcggttgccatccggcgttgtgtttctgcatccgataacgaggtgagcgggccgctgatcggctcgccatcgcgcaccacataccagcaggcgagcaagcccagtttgcgcagcggggcggggacggcgctaccaatgacggacatgatttgaacagtgggcataagtacctccaaacgttatggaggtcaccttacggtttgctggcgcctgggaaaaatcacctggctcgatagtcgacatcaatgtcaggcgttaatccaccacctggtcgagcatgttcaccacttcgtgctcactgagcaggcccttgcgcaccaggttttctgccaacaatgccaggaacttggcgctgcgatggccttccaggtgcttgagttcggtcaaggcgctgtagaccttgctggaagtgcaaaggccggcggtgcggtgcgggttttgtgtgggcatggtcaatcgtccttaattgttattggctggactgagtcgatagtgcgactgttttgtgacgcaaacatgacagcgcagcccgcaatcgatcaagaggatatttgacgcttatgatgtgggattggcgctcgtgcgttgttctcacagcgacactggcaggataaatccggacttcccaggcaaaaaaaggccccgcgtgtgggcgaggcctgtggctgtcaacggggttaaaccttaccagccatggcggtagtaaccgtgaggcgggccgtagtagccgcgaggtggcccataataaccgcgcggtgggccgtaatagacgggcgccgggcggtagtaaacctgctgttgcacatacaccggtggcggtggcgcgtagtagaccggcggcggcgcggcatacaccggttgcggctgcacatacaccggttgctgcacatacacctcacgcggctggctggcaaccacagagccgactactgctgcgccgacaagcgcaccgaacacggccgggccaccccaaccaccaccgtgggcggaggcttggccggccatcgcgagtgcgccgataagcaaggcgattctggggagtttacgcatgatggtcattcctcaattagcccctgcgcttgtggtctgcaatcaatagactcaaggattgtcgcggggatacttttaagacaacgtatttcgagaaaacagcaccgccaatgggtaaaggttgtgtaaggtctgtaccgatttgcttacttcaaggagttatccatgcagatgcaccccaacaaggacacccaactgtgcatgtcactgtcggcgcgccctgggaactttggcctgcgttttcataaccacctgtatgaacagctgggtttgaatttttactataaagccttcagcagccaggacttgcccggcgcgatcggcggtatccgcgccctgagtgtgcgcggttgcggggtgtccatgccgttcaaggaggctgctattgccttggtggatgaactcgacgattcggttcaagccattgactccctgaacaccatcgtcaacaccaacggccatctcaaggcttacaacaccgactacatcgccattgagcaactgctgaaaaagcacgcggtgcccaaagattccacctttgccctgcgcggcagcggcggcatggccaaggcggtcgccagtgccttgcgtgacggggggtacgccaatggtgtgatcgtggcgcgtaatgaggtggcgggccaggcattggccaggaacctggggtacgcatggcaggcggaattgggcagcctgcgcccacagatgctgatcaacgtaacgcccatcggcatgtctggcggggcggaggcggatgcgttggcgtttgagcctgaggcaatcgatcaggcggagactgtcttcgatgtggtggcgatcccggcggaaacgccgttgatcgtgcgggggcgtgcgcagggcaagcgggtgattaccgggctggaagtgatcgctattcaggcgttggagcagtttgtgctttataccggcgtgcggcctacgcaggagcagttcgaggcagcggtggccttcgcccgcagctaaagccttacaccaatccaatgtgggagttggcttgcctgcgatggcggcgagtcaggcgacgcccatctacctgacaccccacgatccaactgtgggagcgggcttgctcgcgaaggcggcctgacaggcgacactgttataccgagtacatatccatttctgcggtaacggccacttagggttccgccctgacggcggctcactttgcaaaagcggcaaagtaagcaaaacgctcttgccccaccactcggcacctcgcttgggctcggtgtgcccgaacgcaggcttgaatccgtgggccgccgccacgcgccatccatggcgcggggcggctaacccggcgtcctgccgggttacccacgaattcaagcctgtgttcggccagcgtggtttaacggggcgcctaagatcaaaagcagatcaagagcaagagcggctcgcttcgcatcgtggttaccgttgatcacttcagaattgtgtcgatacctatggctatcgcaggcaagccagctcccacatctttatctgcgttatgcctgttccagttgcgctagccgctcttccagtgcggcaatccgcgcttccagctcttcaatccgctccaccgaaacagcacccgcgctacgctccactgggttcccccgcgcggacataatcgcttcaatatccgccgggtcccccagggcatgggtatatcggtcttcccgctggcccgcctgacgcggcaccagcagtgccagtcctcgtgcaatcaggcgttccagttgatgcacgacctgttcggcatcctcaaaatcatgcatgcgcccactgcgggtgagcagctcattgacggtctgcggcccccgcaaaaacagcagcccggtcaggatcacctgggccggcaccagttccagggccttgtccacacggtgttcccagcggtcggcgcggctgcccattaccaggcgcgtgaagccttggccctccagcacgcgcaggctctggccgacctggccttggctgaggttcatcaccggctcgcggctggtcttctggttgcaggccagcaccaaggcgttgagggtgagggggtaggtttccgggttggtcgcctgtttttcgatcaggcagcccaggacgcggatttccgtgctgttcaggcgcggctcaggggtgtcggtgtcgtgctcggcggtcatcgcgctttccctatgcagtgaagccccttagcctaagcttgaaaaaataaaagacaagcgccaggcatggctataatcgcggctggttccaaccccgccattaccgtgagactgtcatgactatttccctgtacgccgcttccatcccggtcttcaagcaaatgctcaacgccctcagcgatgtgctgaacaaagctgaagcccacgccagcgccaagaacatcgagcccaacgccttgctgcaagcgcgcctgttcccggacatgttcccgttggtgcgccaggtacagatcgccgtggacttcgccaaaggtgtatccgcacgcctggccgagatcgaagtacccaagtacgaagacagcgaagtcacttttgccgacctgcaagcgctgatcgccaaagtcctggcctttgtcgacaccatcaagcccgagcagatcgacggcaaggaaggcatcgagatcgttacccgccccggcaccccgaaagagaagcgcttcagtggccagtcctacctgctgacctacggcctgccgcagttcttcttccacgtcaccaccacttatgcgctgctgcgtcataacggcgtggaagtgggcaagcgcgactatatgggcgcgttttaaacccgcagatacaaaaaagcccggtgccgttctctgcgaatggcaccgggcttttttatggggctgtgttaagcggcctgctcttccttgcccaaacacgccgccgccgtaaacagcacatcggtagacgagttgagtgcggtttccgccgagtcctgcagcacgccgatgatgaaaccgacagccactacctgcatggcgatttcactggggatgccaaacaggctgcacgccaggggaatcaacagcagcgaaccacccgccacccccgatgcaccgcaggcacacaccgcagcgactacgctgagcagcacggcggtaggcatgtccacggcgatgcccagggtgtgcacggccgccagggtcagcacggtgatagtgatggcggcgccggccatgttgatggtggcaccgagcgggatcgacaccgagtaggtgtcttcatgcaggcccaggcgtttgctcaacgccaggttgaccggaatgttcgccgccgagctgcgggtgaagaacgcggtgagaccactttcacgcaggcacatcagcaccagcggataggggttgcggcgcagtttccagaacacgatggccgggttgatcaccagcgccacgaacaacatgcaaccgatcagcacggccagcaggtgggcatagccgagcagggcgccgaaacccgaggtggccagggtggaggccaccaggccaaagatgcccagcggggcgaagcggatcaccacgcgtacaatcagggtgacgccgttggacaagtcgtccaataccgtacgggtggtttgaccggcatggcgaatagcgatgcccatgccaatggcccaggccaggatgccgataaagttagcgttcatcagcgcgctgacggggttatccaccacactgagcgccaggctttgcaacacttcgccaatgcctccaggagcgctcaccgtggcgtcatgggtcgccaataccaggaacgacggaaacatcatgctggcgaccaccgcaaccacggcggcggcaaaggtgccgagcaggtacaggaacaggatcgggcggatatgggtttcctggccatgcttatggttggcaatcgaggccatgaccagcacaaacaccaggatcggcgcgacagccttcagcgccgtgacaaacaccttgccgataaaaccagtggcgcgcgcggcctcgggtaacagcaaggccaacacgatcccggcaatcaggccgatgacaatttgggtgaccaggctgacgcgcattaaacgttgcaacagggagggggcagcagtcataaagagttgtctctagtttttttagtagggcacagcattgcaggcagaaagtactgtaggaagtaggcgcgaagtctagcatgctgtgggaagcgtcttgtttgctgcggcattccgtcacccgtttcagtcgggcttggtcaaatccggacatgttctgttaagattcacccctctcatctttcctctccttcagcgagcccttagggctgtcgttgatgtcgtcgtttctggagttttcatgttgtttcctatcctgctgctgtcagccgccggttttaccgtgctgaccacagagttcgtcattgtcggcctgttgccgtcgattgctcgggacctgaacgtcagcgtgtcccaggccgggctgctggtgacactgttcgcgttcaccgtggccgcgttcggcccgttcctcaccgcctattgcgcgcggttcccgcgcaagcgcttgtttatcagcatccttatcatgtttgcggcggccaataccgtggcggcattggcaccgaatatctgggtgatggccgtggcccgtttgatccctgctctgggcttgccagtgttctgggccctggccagcgaaacggcggtagacattgtcggccctgagttcgccgggcgcgcgattgaaaaaatcggcttcggcattgtctgcgccaccgtgtttggtattccggtgggcacgctgatttccgatatgttcggctggcgcaccgcgtttgccgtgctcgcggtgatcgccctggccaaggcgttgctgctgtatatctacctgccggtcacccaggccaagcaccagcaggccacgttgcgctcacaattcaagatcctgcgcagcccggtgatgcaggggcatatcctgctgtcgatcctggtattcagtggcatgttcaccgcctatacctacctggcagatatccttgagcgtctggccggcttcgacggcacgttggtgggctggtgtctgatgggctttggcgcagtcgggctgatcggcaactccttgggcggacgtgccgtggatcgtcacccattgatcgcgtccatggtgttctgcgggtttatgatcgcgggcatggtggcggtggtgcctgcgattcactcgaccatcggcctggccgcggcgatggcggtgtggggcgtgacccaggcggcgatgttcctggtcagccatgtgcgcttgatgaaggctgcgccccatgcgccagcgtttgcggcgtcgctgaacattgccggggccaacctcggcattggcctgggcgccatggtgggcgggcatgtcatcgacaccctgggcctgggcagcctggggtttgccgcttcggggtttatcctactgtcgatcctgctggcactgtggctgatgaccgccaaacccacggcgctcaacgcctgaatgatcagggcagggcggtaaacaactcccgccgggcaccttcggtaatcgccacaatgccggggtgcttgaccttgcgctccaccgagatcgcataaaacgactcggtcactgcatcggtctggccgatcagcgccacgccatattggcgcaccacctcatcggcgatcacgctgggcgcgataaaaatcccactgccggattgcccgaacgcctgcatcaaggcgctgtcgtcgaattcgccaatgatgcgcggttgaatctgctgttcggcaaaccagcgctgcagacggctgcgcaccacggtctctgcccctggaatcaacagcggtgcgccctgcaagcactgtgggaaatcaccgccatgctggtcagccaatgcctgggtggcgaaaaaactaatgccgcattctcccagcttctggctgtagcccttgatgtccaagtgcgtgggcatggggctgtcggaaatcactaggtccaggcgctggatcgccaggtcggccagtaaacgttcgagtttgtcttcacggcaggtgatgcggatcggttcgctcaactccatggtcggcgcgatcaaccggtacacgatggacttgggcaccacatccgccaccccgacccggaacgggatctgctgctcgtcaggctgtgcgcgcagcatcgcctccaattcattgccggtctggaacatctgctcggcgtagggcagcgcctggcgcccggcttcggtcagttcaagctggcgcccgacccgctgaaatagggccaccccgaaggtctgctccaacaggctgatctgcccgctgatggtctgcggcgtgaggttcaactgctcgcaggcgcgcacgatgctgccagtcttggccaccacccagaagtaatgcagttgtcgataattgagcatcgcgacctacacttcgtaaaaagcgaagtatacgcgagaaaaatacgaattttcctgaactgttcgtctacatagaatgcctcgctatcgaggggccactatttggacccaatggttctaacgaggaatacatcatgaaactcaattccctgggcgcggcgtcgttgcttgcgctttcattgataggggtcagcggctgtgatcaagtcgagaaaagcgcgcaacaggtgttgggcaaagccaccgagtcggccaagcaggccatcgacgacacccacaaggccgccgagcaggcattgagtgaagcaacccagggcttgatcagccctgagaagcaggaaaaagacgccgaaaatgacgctgaatccgacaccaaagaaacctaactccccagcactaaaacgtcaggactgacctatggattaccttttacaactggccgccagccccaccgcctgggtcgcactggcgaccttgatcgtcatggaaatcgtgctgggcatcgataacctgatctttatctcgatcctcaccaacaaattgccagagaagcaccgggccaaggcgcggcgcattggtatcagcatggcgttgatattgcgcctgggcctgttgagcaccatcgcgttcatcgtgcaattgacgacaccggtgttcgacgtgttcggccaggcgttctcgtggaaggacatgatcctgatcgccggtggcctgttcctggtgtggaaggcaaccaccgagatccatcacagcatggacccggagcctgaagagaaggccaccgtcagcaacaccgtgaccatcggctttgccgctgccatcggccagatcctgatgctcgacctggtgttctccatcgacagcatcatcaccgccgtgggcatgaccgagcacttgccgatcatgatcattgccgtggtggtctcggtgatcgtgatgctggtggccgctgaaccgttggccaagttcatcaacgacaacccgaccgtggtgatgctggccctaggcttcttgatcatgatcggcatgacgctgatcgccgaaggcttcggcgcccacgtgccaaaaggctacgtgtatgcggccatggcgttctcggcggcgatcgaatgcttgaacatcgcccggcgtaaccggcacgcacgtttgctcgctgcgcgccagtaaccgctgaacaaacaggccggctgtgctcacaagagcccagccggccttttgctgtctgctagaatcggcccacttgatagcttgaggtcccccatgaacgagccgattcgccttacccagtacagccacggtgcgggttgcggttgcaagatttcgccccaggtgctggaagtgatccttgcgggcagcggtgcacagaacctcgaccccaacctgtgggtgggcaatgcctcccgcgacgatgcggcggtgtacgccatcgacgacgagcgcggcgtggtgtccaccacggactttttcatgccgattgtcgacgacccgttcgacttcggccgcattgccgccaccaatgccatcagcgacatctacgccatgggcggcgaccccctgatggccatcgccattctcggttggccggtcaacgtgctggcgccggagattgcccgcgaagtgattcgcggcggtcgggccgtgtgcgacgcggctggcatcccgcttgcgggcgggcattccattgacgccccggagccgatctttggcctggccgttaccgggatcgtgcaaaagcgccacatgaagcgcaacgacactgccactgccggctgcaagttgtacctgaccaagcctttgggcatcggcatcctcaccaccgccgagaagaagggcaaactgcgcgaggcggatatcggcctggcgcgtgactggatgtgcaccctcaacaagccgggcagccgtttcggcaagttggccggtgtgacggccatgaccgatgtcaccggtttcggcctgctcggccacctggtggaaatggccgacggcagtggcctgaccgcccgcatcgactatgcaaaagtcccacgcttgccgggggttgagtattacctggaccagggctgtgtgccgggtggcaccttgcgcaactttgaaagctacgccagcaaactggggcgtgtgcaggagctgcacaagcgcgtgctgtgcgacccgcaaaccagcggtggcctgctgatcgccgttaccccgcaaggtgatgccgagttccacgccgtggccgccgagctgggcctggcccttgagcctatcggtgaactgctggagcgacagaccaacgcggttgaggtgatttgatggcgacggacatcaccgattaccgcgatatcttcctcaacgaccggccgatgatggatacccgcgcgccggtcgaattcgccaagggcgcgttccccggggtgattaacctgccgctgatgaccgacgatgagcgccagcgggtcggcacctgttacaagcagcaaggccagcaagcggcaatcgtgctggggcatgaactggtgtcgggtgcaatcaaggccgagcgcatcgaacaatgggcgcagtttgcccaggctaaccccaatggctacctgtactgctttcggggcggcctgcgttcacagatcgtgcagcaatggttgaaaaccgaagcgggcatcgaatacccccgcgtcggcggtggctacaaggccatgcgcaccttcctgctggaaaccctggagcaggcgaccgcccagtgtgatttcgtactgctgggcggcatgaccggcaccggcaagaccgaagtgctcggccaactgcgcaatgccctggacctggaaggccacgccaaccatcggggctccagcttcggcaagcgtgctacggcgcaaccctccaatatcgacttcgaaaaccgcctggccgtggatttgttgaagaagcgcgcaggcggtatcgagcagtttgtggtcgaggacgagagccgtatgatcggcagttgtgcgctgccattgccattgcacaaggggatgcagacgtttccgatggtgtggctggaggacagcgtcgaaggtcgcgtcgagcgcatcctgaaggattacgtcgtcgatctgtgcgccgagttcattgacgtatggggtgacgctgggcaggggttgttcgccgaacgcctgactcagagcctggccaatattcacaagcgcctgggaggtgagcgtttccaacggctgcagacggtgttacaggatgccctggccgaacaggcacgcagcggcgcggtggacctgcaccgggtatggattgaaggcttgctgcgtgagtattacgacccgatgtatgcgttccagcgcgagagcaagggcgcgcgtatcgagtttgccggggagcagggggcggtggtggagtatttgcgcgagcgggcgacccgggtggggtgacctttcggacgccatcgcaggcaagccagctcccaccttttgaagtgtgaatacatacaaaggtgggagctggcttgcctgcgatgagcataggtatctacacaactttgtaggctgtagcagccgacggtaaccacgatgcgnnnnnnnnnnnnnnnnnnnnnnnnnnnnnnnnnnnnnnnntggtgctcggcggtcaggcggttttggcggtcgtattcgtaggccaacgcccagtgaccgtcttcgacgctgaggaggttgccttggcggtcgtaggcgtagtcgacaacgttgctgtcgggcagggtttttcgtacgaggcgcccggcgtggtcgcgctggtagcgggtgattaattggctgccatcgtcgccgtattcggttttctccagcaggttgccattgaggtcgtaggcagacgcggtgcgctggccgtcgaagccggtttcctggcggatcaggccattggggtggtagtcgagctggtaggtttcgccgacttcgttttcgatctcggtgagcagcagccgggcgttgtcgtagcggtagttgacctgggtgccgtcggcgttgaggcggcggctgaacaggtgcaggccgtctgcgtattcgtagcgggtgacgtggccgagttcgtcgcgttcggcgatgattttgccgtaggggttgtagctgaattcgcgtgtggcgccgcctggcaagacgaggcgaatcagccgaccgacgctgtcccattcaaagactgtttgcgcgccgtgctcatcctcacgggcgatttgccttccgaggtcgtcatagcgataacgcttgatcccaccattgggcaattgctcctcaagcaactgcccccgctcgttccacaccaaccgatgacaactgctgtcgggataccaaactccagtcagttgcccctgtttgttgtagctgtagtcagtagcctctccatcgggatcggtcctacgcgtaacatcgccttgctcattacgctcatatttccagaccgcctccccacgccgaacaacccgtacaaaatcgttgtcatgctcgtaggacgttggctcatcatcccccggaaacagcgcgaccaggcgtccggcgtcgtcatactgataggccgtcaccgcgcccatcggatcttgctcgacggtcagccgcccctggttgtcgtaggatttaaagtgcgtggcgccgtccggatcaatcctctgcaccagccgcgcccgctggtcatggacatacacctcctggctaccatcggcgttatgcaccgtgacgcgcccgtcatccccccaggcatagcgcgtatccatttgcgaaaagctcgcccaatgccggacgcagcgcgccgccttgccagcgcgctcccattcccaaaagaaactcgcgccaccggccagttggcgttcaagaatgacgtgctgatcgtcgtagcgataacgctcgctttccccgacagcgttggtcgcgcaaaccagtcgtccatcttcgtcataggcgtaggaaacaacgttttgctcggtgacccacacgtagggctcacgccctttggcgcgatgcacctgatagtccaccgcgacgatgcgacccaactcataacgcagcagcaacgaacgaccggcgccgttatccagccgctcaatccgcccagaacgatcccggcaaaggcgcagccggttgtcatacgcatcgctgatggttgtcagcacaccgtcgcgaaagtggtagaaacgcgacgcctgggccagcaccagttcatcaggcgaggctcccaaatagatcgccgcttctgccagactattggtgatcgcgggtcgagccgctgtaggcaagggcagggtagtcgagcggttctcatggtcagtccacaccaccaaatcgcccgacaccaccagccgatgagccagcgcatgactccagccaaaccccaacccacaatcgacttcaaccgcactggtgcggtacagccgcgtccattcaaacggcaagatcccatccagcgcgccgtcggtaagggtgagcaactcctcgccggtaaccatcgacaccgggcaaccgtgagtgaccgttttatccgcagaagccgccgcatctcctttgggatttgaagccacagccggcacatcatcgacaggctcctgacggaccaacgtcgtgcgctgggtcttgccgcgcaccatcggcgccgggctcgaaaccagcgtgtcgcccgccttcaacggcaccaccggcactgtcttgaccggcgtcgccgcactgctcagcaacaccggcttggcgacctccacatgggtttccagccgaggcccctccacctgcttggccagcaattccaacaacgcccgcgcccgcccggatttgacgtgactgagcacacgagcccccaatcgcaccaccacgcccatcgcacccaacacgcgaatcagcagcagattgatcagcacctcaccggtgatttcaccccacagttcagccatctccgtaggcgggagcatgcgcatccagctgaccagcgccgccaggtagacaaacagcagcggctcatcactgagcaccaacaagccctgggcgatcgcgtcactgctcagggtcagcagttcatcgagctcagtttgcgaaaggtagtgcagcaacttttcgctattgggcttgaggtccgccagcagcgcagacaactcgccaatgttgtcccacaggctgtaaagcgccttgcccaacccactggcaaaagccgcttccagcaggcagcgccgctcaagcgggcgggcgtctatgtaatttttccactgggcttggaaggtgtcgctccactctttgcgcagccgggcttccagcgcggcgatcaccgactggtaggacgcatacagcgccttgaagtgatcttgggaaacgttggggtagaaactcacccggtattgctggttgcgatcacactcggtgacttcgaggatgccactggggccgatggtcttatgaatgggctcgcccagcgggccgccgtttggatcaacgcgttgcaccaccaccggcgtgttgccgacgggcacaaacctggtgctctggaacatatgcaccagggtcaaggtccctgtggcctggcacgtggcgacggtgctgctgggcaagagggagcgagtgatcggggcaaccagcgcgacgtcatccccgaccttgaacacctgttcgacgtccagcgccgagaagctccaaaagctttcggcccactcgtcaaaggtgttcaagcaatcgcgaaagtcacggaagacgccttcaacgtcgaccgtttccgcgttcattggcgtcagcgccagcctgccaatggccgggttcaagtgccggccccgtcaaccgcacgcgtcacggaaaaaaccatctgcactccctcgcactgtttgatcaggcgagggactttgcagaggtttgcgcaggcgaggagtagagcttatccggcagttgtgtgggatgtttcagttactgccaggcacggggttcggcatgccgacgaaccccggttagacttacctgtcgatatcagcactgcccggcctgtcgttaaccaaggaagccccatgtattcaacgcgtctgctgctctgccttattcctttgctggtactggccggttgttccacctcccgtggccctcagcagcccgagcgcagtgaagccgaggtgaaggcgcagatcgtgcgcctgctgccggccaaggtcgcggaccgcaacggttgggcccaggacatctataccgccttcgacacccagaaaatctaccccagcaacgaaaacatctgtgcggtattggcggtgaccgagcaagagtccacctatcaggtcgacccgccggtgccgggtatgggcaagatcgctcaggatgaaatcctgcgccgcgccggcaaggtgcatgtgccggcattcgtggtgcgcagcgccttgcaactgcgctcgcccaccggcaaaacctacgccgaccgtttgaatgccgcccgtacggagagggatttgagcggcatcttcgacgacttcatcagtatggtgcccctgggcaatacgctgtttggcggcttcaacccggtgcacaccgcaggccccatgcaggtcagtatcgactttgcgcagaaacaggcgcggagttatccctacacggtggacggcacgattcgccgcgaagtgttcacccgtcgcggtggcatgtacttcggcatcgcccatctgctcggttacccggtgagctacgaccagccgctgtaccgctttgccgacttcaacgccggttggtacgccagccgcaatgccgcgttccaggccgctgtcagccgtgtgtcgggtaaagagctggcgctggatggggatttgatccgctatggctcattgctgcccggcaccaccgagctggcggtgcgttcactgggggcgaagctggacatgcgcaacccgagcattcgcagccaactggagcagggcgagcagttggattttgaggacaccaccttgtacaagcgcgtcttcagcctggccgaccaggcggccggcaagccgctgccacgggcgatcctgccgggtattgtgctcaagagcccgaagatcacccgcaacctgaccacggcctggtttgccaagcgcgtggatgagcgctaccagcgctgcctgaagcgctgatcaactgcggcgcttgacgaaccggcgccacaagcccacccacaaccacaccaccgggaacgccaggatcacgaagggcagcacatagctggcacgttccagcgcgtctgcggtgccgttcaccaggttgtctcccaggttgctgaacatccgggtgaaccttgacacctggttggcgccgtccgaggaacggaatttcaaggtcacacggttggtgtcgaggcggcgttgctggccggcggcaacctgggccagttcctgcagctcgttttcaataccggcttgctctttgctcaggacgatcaggtcgctgacggtgatgtccttgcgcttggccagttcgtcgaggcgttgctgctgggcttgcaggcggtcctggcgacggcgcacatccgccacggcatcggccaggtcttcggccgtggtgatgcgctggccgagcttaccgccttcggccgccagggcgaccatcggctccacacccgtgggcgcgatccgcaggatgatttggccaccctggccgtcttcggtaatgccaaggatattgcaggcaccaaagcgcgctgtttcacacgcctcgcgagtggcctgcatacgcggtgcgagcagagcgccgggcagggccagggtcaattcatgctcataggccagttgcgccccggccttgccctgttcgccattgatgacggtggcgcgagagtggtccttgggggaacaaccggccaaggccaggccggccagcaagattaacagcggcgcgcgaagcgggtgggagttgccgtccaggtggcgcatggcgtttccttgaaatgtgtaggagaaattggccgagattaaagcgggtctggcccattaacgcaaagcattgcccgggatttgcccggctgatggtggtggctgccgggtcgaggctggcgtacatctcaagcctcataccagggaagcaaccgccatgaacgctcagaccgtcccccaaggttttgtcccattgccgcgcagcagcccgttgctggaacttctcggcccggcgtattgccgtggcgaaggtttgcaattggaagtcggcctgcgcgccgatcatcgtcacgccaacgggcgcggcacggtgcacggcggggtgctggcgacgctggccgatatcggcatggggtacgccatggcgttttccagtgagccgccgttgccgttgattaccgccagcatgaccgtggattacctgggcgccgtgcaggtaggggagtggatggtggtgcgtttggaaagccacaagcgcggacggcagatggcgtttgccacgttgagtttgcaggtggaggagcgggtggtgctgcgggcgagcgcggtgttcgcggtgccgcaagctgacaggcaatgagatcaaatgtgggagctggcaagccagttcccacattttgaccgagttcattcagggggatcgagaaaaagaaaaggcctggttttcgtggaaccaggccttttcaatgttgctcgttatgtctcatatgtaggagcgagcttgctcgcgaagaactcacaggcaacacgttctatgaggagcgctgcgttatcgttgaggtttttcgcgagcaagctcgctcctacaggtcagttgcgttcgagcgccagggctacgccttggccgccgccgatgcacagcgttgccaagcctttcttggcgtcgcgcttgatcatttcatgcagcagggtcaccagcacgcggcagcctgaagcaccgatcgggtggccgatggcgatggcgccgccgttgacgttgaccttctgcgcgtcccactccagctctttgcccactgccagggattgcgcggcgaaggcttcgttggcttcgatcaggtccaggtcagccagctgccagccggccttgtccagacagcggcgggtggccgagaccgggccgatgcccatgatggccgggtcgacgcccgcgttggcgtagctggcgatacgcgccagtacgggcaggccgagagccttggctttgtcggcgctcatcagcagcacggccgcagcgccgtcgttcaggctggaggcgttgccggcggtgacgctgccgtcttttttgaacgcaggcttgagcttggccagggattcggcggtggtgccggcgcggggttgttcgtccaccgcaaaggccaccgggtcgcctttgcgctggggaatcaggatcggtgtgatctcatcggcaaagcgtccggcttcgatagcggcggcggctttctgctgggaggcggcggcaaaggcgtcctgggcttcgcggctgataccgtacttgtccaccaggttctcggcggtgatgcccatgtggtaatcgttgaacgcatcccacaggccgtcggtgatcatgctgtcgatcatcttcgcgtggcccatgcgcaaaccggtgcgcgcggcaggcaatacgtacggggccaggctcatgttctccatgccaccggcaatgatcacctcggcgtcgccgcaacgaatggcttgggcgcccaggtgcaaagccttgaggcccgaaccgcagaccttgttcagggtcaggctcggcacggcgtggggcaggccggcgaggatcgaagcctggcgtgccgggttctggccgctgcctgcggtgagtacctggccgaggatcacttcatccacttgcgccgggtccaggccggtctgctccagcaggcgacggatcacggcagcgcccagttccggggccgggatgttcgccagcgaaccttggaagctgcctacggcggtgcgggtggcagcaacaatcacgacgtcttgcatggaatctgtcctcactggaagtgcatttctggaacgtggtccgggacgatcagtttaccggcggtcttgctcacaatctcttctacgctgacgccaggtgcgcgttccttgaggacaaaagcgccattttcgatttccaggtacgccaggtccgtgagcacgcgcttgatgcagttggcaccggtcagcggcaggctgcactggctgagcaacttggactcaccgtctttggaggcgtgagtcatgatcacgatgatgttttctgcgccagccaccaggtccatggctccgcccatgcccttgaccagcttgccggggatcatccacgaagcgatgttgccctgtacgtccacttcgaatgcgcccagtacggtgaggtcgacatgcccaccgcgaatcatcgcgaacgactcggcggaagaaaagatcgaggcgccgatgcgtgcggtgacggtctgcttgccggcgttgatcatgtcggcgtcgatggtgtcttcggtcgggaacgggcccatgcccagcaggccgttttccgattgcagcatcacttccatgccgtcggggatgtagttggccaccagggtcggaatgccgataccgaggttcacgtagtaaccgtcctgcatctcgcgggcaacgcgttgagccatttgttcgcgggtaagcgccatgattgtttcctcttattgttctggacggggattatttgcggacggtgcgctgttcaatacgcttttcgaaggtgccgcagatgatccggtcgacgtagatgccaggggtgtggatctgcgccgggtccagctcgcccggttcgacgatttcctcgacttcgaccacggtgatcttgccggcggtggcggccagcgggttgaagttctgggcggtgtgacggtagatgacgttgccgaagtggtcggctttccagcctttgacgatggcaaagtcgccggtgatggactcttccatcagatacgggcgacccttgaattcgcgagtttccttgccttcggccacgggggtgccgacgccggtggcggtgaagaaggccgggatgccggcgccgcctgcgcgcattttttctgccagggtgccttggggcgtgagcaccacctcaatctcgccgctgagcagttgcttctcgaacagggcgttttcacccacgtaggaggcgatcactttgctgatctgcttctgttccagcagcacgcccaggccaaagccatcgacgccacagttgttggagaccaccgtcaggtcgcgggtgcctttgcgcttgatttcagcgatgaggttttctggaatgccacacaggccaaaaccaccggagagcacggtcatgccgtcttccaggcctgccagcgcttcttcataggacgccacgcgtttatcgaaacctgccatatgcacctcttttattgtttgtggtccagccagtgagttgagtgttgcgccagcggattgatttgttaagttgttttttaaggttgattgatttagaaaacagcatagtccagtcatcgtccggagcagctcatgaccgtcaaacagatgcgtgcctttctcgccgtcgcgcaaagcctgagttttgccgctgcctgcgagcgtttgcacctctcccaatcggcgttgagcttgaccatcaagggcctggaagaaggtttaggcgggcgcctgttcagccgcaatacccgcaacgtcgcgctgacccctgaaggtgaatccctgttgcccctggcccgccggttgattgccgattgggacaacgccgaagacgaactgcgccagcgttttaccctgcaacgcggccgcgtcacggtggcagccatgccgtcgttcgcggggaacctgttgccgccgatcctgaagatattccgcgcccgttaccctcaggtgaacgtgacggtgcatgacctgatcaatgagcaggtgctggagatggtgcgcgaccgtcaggtggagctgggggtggcgttcgagccatcagatggctcgtcattggcgttcacgccgctgtacctggaccgctttatcgccgtggtcccgggagattcagccttggcacagcgcgctgaaatcgactggaaagctctattggaacagccgttcatcaccctgcaacggccttccaccgtgcgagtaatgctggaagagcacctgggggccttgcagatgaaattgcccgtggccttggaaagccatcaattggcgacggtgggcaagatggttgccagcggtttgggggtcagcgcggtgccggcgttatgcgccaggcagatggaagaggccggagcccattgcattaccttgaccggcccggtgatcgaacggccgattggggtgctgaccaagccggggcatgaactgtcggcggcggcgcaggtgttgtttgatatctttcgagatgaagcggggaagggcaggtttccaactttttaagccggtaatacaaatgtgggcgctggcaagccagcgcccacattaattaaggactacttagtagtaacggtcgatcactttaacttgcgagctgtctttgaaagacgcccaggcattattaagtgtgtcgaacacctgctcgataaagttgcggtcagccgcggctttcttgccgacataaccctggccacggcggtacatcttcaagcgcgccgccagctcacggttattgcggtcaaactcggcttcttcggtatggggcgccaggcagtcaatttgcacttcgcccgatttgccaatccacaggatatggtcgtcgagtgtgtctttctgcgctgcgaacatctcagccaattcatcgatagttggttggttgttcagattcatgtgtaagccccttgaccagttggcgatctatcagttgattcgttaataccagttgagttgtctccggttactaaaaccgggcgtcagcgacgggctgccgaatacgggcagggtcttgaagctgatgcatgtagtcttgctgatgggctgctacgcaatgctctgattacgaagacaagccgcgtttgagcgtcttgtacctgtccctttcggggccggtcagcttcatcaatctgccttgtgggcagtgcacatccagaaaaacagctcggcggtcagacgagcctgttcaaaacgcttgttaccaacgctctcgatccgagagacgtctagatcatgcaaggacaaaaaggttacgtcaacggttatgtagtgattatttttgctcactacataaattgccgtggggacgggggaatgcgggaaaacgtgacttgggcgtcattttctgtgcggtgggtcgcgggattttggtgacgaatttacgcagatcccctgtgggagctggcttgcctgcgatggcgatgcgtcagtgggtacatgttcgcctgacacactgctatcgcaggcaagccagctcccacaggttgatgcgtcgctatctcaatttctcggacagtaagggtaatagccgctcgcaggacgcctggattttcacctgcaacagctcatcaccccgagtcttgcccaggttgatggcaatcaccggcttaccctgttcaactatcgccttgcacaggcgaaacgccgaataggccatcagcgacgaccccaccactaacagtccttcggcatgttctaccgccgtcatcgccttgagcgccgtcgccggtgcgacgttctcgccaaagaacaccacatccggtttcagccgttcgccgttgcaatgtgggcagcggggtatctggaagcgctgttcaaacatcggatcgagcagggtgtcgccatccggcgcttgcaccgcatgaacctgtgccatgtgcgggttatcgacttccatctgccgctggatcacatcgcgctcgctacgcagttggcaatccaggcacagcacccgatgcaagctgccatgcagctcgatcacatcctggctgccggcctggtcatgcagggtgtcgacgttctgcgtaatcagcccgctgatatggccacggtgttgcagcgtcgcgagcgcaaggtgggccttgttcggctgggcaatgcgcacccgcggccaccccagcatcgcccgcgcccagtagcggcgccgcgcctctggagtggcgaggaattcctggtacatcatcggtggcttgccccggcgtacaccttcaccgtcccggtaatccgggatgcccgaagatgtactgatccctgcgccggtcagcaccagaaagcgccggccggtcatggcccggtgcagggtgtcgaggtggtcttgctgatggtccagcgtgtcgagcatgggttccccctattcgccgcggatgtactgttccagctgctggatcaaggccgcttgctcggcaatcgcttccttgaccaagtcaccgatggacagcaggcccagcagtttgccgtcttcgaccacgggcaggtggcgcaggtgactgtcggtcatgatgttcatgcattcctcgacactcttgtgagtatccacggtgatcaccggcgagctcatcacctcatggaccttggtggtgaccgacgagagtcccttgagcatgattttgcgtgcgtaatccctttcgctgatgatgccgaccaccacgtcatccttgaccacgggcaaggccccgacgtttttctcggacattcgcaccagcgcttcaaacacggtgtggtcccatttgatggtgtggacgtcctggtttttctggtccttggctttgagcagttgtgcaacggtcttcatggcggccactccggtgttgttgttggtagtccagatcccctacagaatcctagaccgaacccgccggagcaagggccaatgcggcgttaaacctgtcgaaaaacgtcatgggccggtttttttcggtatttatcccgcatttgccggctttttcccgcgtttggggctggcagcagccttacgtggcgcggccttgcgtttctttttccacggcgttgctcctcggccagcggggctggcggggccagtgatggtcatgcgcatgccgttgcagcgcgccacctgcttgctcatccacgccgcttgcttggccacgaactcttccaggctcatttcgccgctttgcaccatgtccagtgcctgttcccagatggcggtggtgccagggtcggcgatagcgcggggcacggcgtcaatcaggctgaacgcggccggggttgccgacagggccttgccgtttttcaccaggtagccgcggtccagcaggccctggataatcccggcgcgggtggcctcggtgccgatgcccgtggtgtccttgagtttttgcttgagcaacgggtcctccaccagcttggcgacgtttttcatcgccttgatcaggtcgccttcggtaaagggcttgggcggctgggtccataggtccttgaggttgaccttggccacggcgtagtcgtggccctgcaccagcgtcggcaatgcttggggcgcgggggcttcgcgacctttggcgggcaccaacgcttcgggcaaggcgcgtttccaacccggttcgatgaccactttgcccaccgcgcgcaacgcgtggccggcacagtcgaaatcggcctgggtgcggtcgtattcatggttgggcaggaactgcgccaggtagcgcgcacgaatcagcgtatagaccgcacggtgcttgccggtcagttggctgacctccttgccggcgccggtggggatgatgccgtggtgggcgctgaccttggcgtcgttccaggcccgcgaacggcgctgagggtcgatgttcggcatcagttcgttgaccgctgtgtccgcacggcccagtgccgccagaatcttcggcgcttcactgtgctggctcagcggcaggtagccgcaatcgctgcgtgggtaggtgatggccttgtgggtttcgtacagggattgagcgatgtccagggtttcctgggcgcccaggccgagcttcttcgaacagatctcctgcaaggtgccgaggtcgaagggcaggggcgccacttcgcgcatacgctcggtacgcagttgcaccagtcgcgccgtggcggcgttgagcatggcgtcggcggcgtcccgcgccagttgcgggttgaggcaacggccctggtcgtcacaggcatcgtcaggggcgcgccattgggcggtgaaggtcatgtgctcgtgacgcaggtcgacatcaatggcccaataggccaccggcacgaagtcggcaatgctgcgatcacggtccaccaccaggcgcagggtcggggtttgcacgcggcctaccggcagcacgccctggtaaccggattggcgccccagcagggtaaacaggcgactcatgttcatgccgatcagccagtcggcacgcgagcgccccagggccgaatgatacaggctgaaggtttctgcaccgggtttgagcgccgccagggccttgcgaatggaggcgtcgtcgagcgccgacaaccacagccgctggatcggaccgcggtagcggcagtgttctaccagttcacgggcgatcatctcgccttcacggtcggcgtcggtggcgatcaccagttcctgggcttcccccagcaagcgcttgacggccttgtattggctggcggtcttgggcttgaccagcatcttccatttttccgggacgatcggcaggtcggccagcacccagcgtttgtatttggcgtcgtaggcgtcgggcggggcggtttccagcaggtggccgatgcaccaggtgaccgtgactccatgacccagccagcacccatcgccacggcggctggcgccgagcacggccgcgatatccttggcctgggagggtttttcacagaggtacagccgcatggtcatcacatcagatcaggttgatgccttgcaggatgcttatttgaacggatttgagcaaccattatctgtatggatgtacagcaatttgtgtgagcactgcacaccgctgtaggagcgagcttgctcgcgaaggtcgttaacgatgacgcggggcgcctggtgccccgcgttgctctcaggttcttcgcgagcaagctcgctcctgcaggggggaggtatcagttgttttcgatatccacatgccgggtttctttaaggcagaacagcccgacgatcaggctcacccccgtcaccaccaccgggtaccacaacccgtagaagatatcgccggtgtacaccaccagggcgaacgacaccgtcggcaggaacccgccaaaccagccgttaccgatgtggtagggcagggacatcgaggtgtagcggatgcgcgtcggaaacagctccaccatcagcgctgccaacggcccgtagcacatggcggcgatgaagatcagcaccacgatcagcaccaccaccatcagcttgttgacctgggccacatccgccgatgacgggtagccggccagggctacagcgccacgcagggctgcttcatcaaagccatcgatacgcacatcgcccacgctcacttgcaccgggctgcccgcaggggcggcggcgctgctgtagggcaggccctgtttgaccaggaaggtcttgaccttgtcgcacgggctgtcaaaacgggccttgcccactgggtcgaactggaaggtgcaggtggccgggtcggccagtacggtgatcggcgcttgttggctagcctggtccatcgccgggttggtgtagtgcgccaggcccttgaagatcgggaagtacagcgcggtcgccaacagcaggccgagcatcagcaccggcttgcgcccgaccttgtccgatagccagccaaacaggataaagaacggtgcgccgatcaccacgctgatgatcaacagcatattggccagggctgggtccatgcgcaggaactgggtgaggaagaacagcacataaaactgcgctgcgtagaaggtcaccgcctgcccgccgttgatgctgaacagggcgatcagcaccaccttgaggttttcccacttgccgaaggactcgcgaatcggcgccttgcaggccttgccttcctctttcatcttcaagaaggcgggcgattcgtgcaggctcatgcggatccaggtcgagatgcccagcagcacgatggaaaacaggaacggaatgcgccagccccacacttcgaactgatcgccggtgaagtaacggcaggccagcaccaccagcagcgacagcagcaggccgagggtggcggtggactgaatccagctggtgtgcaggccgcgcttgcccggtggcgcatgctcggccacgtaggtagcggcgccgccgtactcaccgcccagcgccaggccctgcagcatgcgcagcacaatgaggatgatcggtgcggcaatgccgatgctggcgtaggtcggcagcaacccgacgcagaaggttgccacgcccatcaggatgatggtcacgaggaaggtgtacttgcgcccgatcatatcgcccaggcggccgaacaccagcgcaccgaatggccgcaccacaaagcctgcggcaaaggccatcaaggcaaagataaacgccgtggtgtcgttgaccccggcaaagaactgcttgctgatcaccgccgccagggcgccgtagaggaaaaagtcataccactcgaacaccgtccccagggaggaggcgaagatgacctttcttgattcgttggcggtacttgcactggccgctgagcccaggggttgagcatgttctgacatcgggtgtccctcacagtgattatttattgttgttccactgtcggcgccaacctcagcgccgctattttttcaacgtcaacgattacgcggggtgccctgtagtgcgcggtgctggtgggtttttcgcgagtaagctcgcgcctacagtgttgggtgacaggatgagctgcgcggctttttccgcgatcatcagcgtgggtgagcaggtattgccggaggtgatgcgcggcatgatcgacgcatcggcaatgcgcaggccggggatgccgtgtacgcgcagttggctgtcgaccaccgcgtccttgtcatcgcccatgcggcaggtgcccaccggatggaaaatcgtggtgccgatccgtgcggcggcttcgtgcagttgttcttcagtttgcaggtcttggccgggcaggtattccaccggtttgaactggctcagggccggagcggcgacgatgcgccgggtcaggcgaatggcgtcggcggctatgcgcaagtcttcggggtggctgaggtaattgggttgtatcaagggggcgtccgccgggttggccgaacgaatatccacccggccacggctttgcgggcgcaggtcgcagaccgacgcggtaaatgccgggaagccgtgcaatggttcgccaaagcgctccagggacagtggttgcacatggtattgcaggttggcagaggtctgctccgggccggagcgggcaaacgcgccgagttggctgggcgccatcgacagcgggccgctacggtcgtacaggtagcgcaggcccatgcccatcttgccccacaatgtgccggcgatctggttcagggtgcgggcattttccagcttgtagatcaggcgcagttgcaggtgatcttgcaggttgccgccaacgcctggcagttcatgcaccacgtcgatacccaggggcttgagcacctgggaagggccgatccctgaacgttgcagaatgcccggcgaacccaccgagccggcgcacagtacgatctctttgcgcgctttccagatcagtgcctggccgtgttggcgccccagtacctgcgaggcacgaccgttttccagcagcacacgctcaacctctacctccgtcagcacggtgaggttaggccgctggcggatcggcttgagaaacgccttggccgcattccagcgcacaccggctttctggttgacctggaagtaaccgcaaccctcgttatcgccctggttgaagtcattgatattggcgatgccgctttgggcagccgcctcacgaaacgcatcgaggatcggccacgacaggcgctgttgctcgacgcgccactcgccgccctcgttgtggaattcagagccgccggcaaaatggttttcgctctgtttgaacagcggcagtacgtctttccaggcccagcccgcgttgcccgccgccgcccagccatcgtagtcctgagcctggccgcgcatatagatcatgccgttgatagacgagcagccgcccagcactttgccccgggggtagctcaaggcgcgcccttgcaggccggcttgggattcggtcttgaagcaccagtcggtgcgtgggttgccgatgcagaacaggtagccgacggggatatggatccaggggtagttgtcgcggccaccggcttccagcagcaggacacggtgagccgggttggcggacagacgattggccagcaggcatccggcagggccggcgccgacgacgatgtaatcgtattcagcagttgcattgggcatctggggtctcgcttgtttttcttattggccccatcctagttgttagttttcgtcttaaaaatgttagtttttacccacccgctgtgcgtttttaaacaacggcggctggcccgggcactggaggcgatatgttcgactggaatgacctgcggttttttctcgagttgcagcgcagtggccgcctgctcaccgccgcccaacgcctgaaaaccacgcatgccaccgtggcccggcatatcgacgccatcgagaaaagcctcggcacggcgttgttcgtgcaacatgcccagggctatgaactgacgcctgccggcgaagcgctgctcaaacatgcggaggccatggagaacgtggcactgttggccgaagacgagctcacccattctgctgcgcccctgggcaagattcgcctcggcgtggccgaagggctgggggtgatgtttttggcctcgcgcatgggaggcttgtttgaacgctatccaggattggaggtggagctggtcgcggtgccgcgttttgtcagcatcctcaatcgcgaagcggagatcagcattcacctggagcgccccagcgccgatcaactggtgacgcgcaaactcaccgattatcgtctggcgctgtacgccagccgtgcctacctggcccgcaatccgcctatcgagaagcgtgaagaccttgctgcccatgcctggatcgattatgtcgatgacctgctgttcagccaggagctgaagtttctcaacagcttctgccgtaaccccaaggtggtgttccacagcaccagtgtaattgcgcaacaccaggcggcgcgttcggggttgggcattgcggtgttgccgtgttttatggcggctggggatggggagttggtgccgttgttgccggcagagggcattcagcgcagctattggatcagctcgcgtcgggagctgcacaagtcggtgcggttgcgggtgttgtgggattatgtggtggagttgtgcgcgcgggagcagggcttgttgctaggtgagtcccgctgacgcaacacacggattaaaaagtgggagctggcttgctcgcgaaggcggcctgacaggcgacacagttggattgtgtacatatccattcctgcggtaacggccacttagggttccgctctgacagcggctcacttttgaaaggagccggaatgccggcccagccaaaagtaagcaaaaggctcttgccccaccactcggcacctcgcttaggctcggtgtgcccgaacacaggcttgaatccgtgggccgccgccacgcgccatccatggcgcggggcggctaacccggcgtcctgccgggttacccacgaattcaagcctgcgttcggccagcgtggtttaacggggcgcctgagatcaagatcaaaagcagatcaagagcgnnnnnnnnnnnnnnnnnnnnnnnnnnnnnnnnnnnnnnnngtacatatccattcctgcggtaacggccacttagggttccgctctgacagcggctcacttttgaaaggagccggaatgccggcccagccaaaagtaagcaaaaggctcttgccccaccactcggcacctcgcttaggctcggtgtgcccgaaatccaccggcatccctgccggtttaccccccaaatccctgtcgaattccggccagcgtggtttaacggggcgcctgagatcaagatcaaaagcagatcaagagcggctcgcttcgcatcgtggttaccgttggctgcaacaacctccaaggttgtgtagatacctatgctgcgatggcgatgtatcagccactcatgtgcaagctgacccgccgttatcgcaggcaagccagctcccacatttggactgtgttgtgtcagggatagtctagagcttcaccacctgatgcacctgctcggcacaggcccgagcttcttcaatcatcttgccgaacgcatcgctggtgacttcggcatgggtcagccaacgttttttctggctcaggcgatagtgatagcgcagtgagccgtcttccagttttccgtccaggtcgaggtcgtaccagggcgagcgcaccttgcagccggggatggctttttccatcttcccgcctgccagggtgtaggtgtagtcataggtttcggggttgcccaggtagaggtcggcctgttgcccctggcgacgatagttgacgtaaccttcccagcggtctttcaaggacgggtcggtgtagacatagtcattggccagtttttccagggcgcgctgatcgttcatgcgggcgctgacgctgtagccgtcatgtaccacaaaactggtggggtcgcgggtgatctggcagtcgctgatgtcgttgccgaagttggcgcagatgttctggtcggtggcggtggtgccttgctggcggtcggcgacgctcagttgcatcagcggcaggcggctgaaggtaatagtcgccttgaccgcgccatctccctctttgccgtactgcacctgtttgtccaggcgtatcgagacttcggggcgttccagtgggatgtgttcttcgcgcacttggccctgggcgtcgttgaccaacacccagcggtcctgaatatcgggcatggtctggccaggggcgaagaccgggttggtcgggtcaagccaccacacctggccattcacttcggcacgcacgatggcgtggttgggcgcctgtgtgccaggaatcagcagggcatcgaccacgtcgccacggctgacccacgcggtctctgccttgatgccgctggccttgagcatggccgtcagcagggtcgccaggtccttgcagtcgccgtagccgtgctgctcgatttccaccaggctgaacggcacataaccacgctcgctggcgcgccagtcgcccaggtagcggtaatgatcattgatgtgctgcatcagcgcggccacttgctcagccggcgccaggctgcgtgcggcggccacggcggcggcggcttgcgccggcaggttgacgccgaggatctggttgtaacgctgggcaaaatcaccgaagtacgcctggcggtccacggcgctgcctacttccaggcgtgggacgcgcagcagcgcggcggcggaggattcattgatgtagttgaggtagatcggcgctttaagcgccacgtccagggttttgccgttgctcgaaggggtcacgttgaaggcgtcgaacatttcactacgccactggagcgggcgttcggcggtaaagcgcgccttgaaacgatcacggcgggccgcgccggggccgaacttgagcacgtaatggaactggctcatcagcggtttggccggatagtggtggcgtacggtgtagcggatctttgtgcccacgcgcaggttggggaaggccagggaggtttgcttatcgcggctgaaaccctggtctgggttgggcgcgctgcgggtatcgatttgcgtggcggcgagggcgaccggcttggcgccaggctgggtggactgggcgctgatcacttcaaaggtatcgccttcggagtaatcgaaatcgatgcgcgagagcatttcgcggccgttgggtttgaggatcgtgtagcggtaggtggtggtgcagtcggtgctggcgtcgcggttgaagtggcagtgcaattcggtgtcgttggccagtggggcttcggctaggggttgcagtgcagcgctgacggaatgggaaaccagccccagactgatagcaatcaaagggcggtgaaacgaaaaacggtacatgggcgcctcgggtgacacattgaaacagctacccggcgggtagcgagaaggcgccggatgataatggatctcaacggcaaaggccaggattgttcgacaattcttaagcctgaaaggcccgtgctagagcctttacttgatttagatcaaggtttttatgccgccatcgcggcgcgtccttagagaaaccagcgatattcgtgcgcatgaatttcttgctggaaagccaagtgatcctggcgtttgttctcgcaatacacgtcgacaaattccgcgcccagcttgtcgcgcagtaccggttgctgctgcatggcacgcacggcgtcgagcatttccaccgggaaatcggtgccgctgttgcggtcttcgttcagtggtgcgatgggttcacgcttggtctcaaggccatgctccaggcccaccaggatcgccgccagcaccaggtaagggttggcatcggcgctggccaggcggtgctcgatccgcaggttgcgcgggtcggactcggggatgcgcacacaagcatcgcggtcttcaaagccccagctcgcccgcgtcgcagcgttgaccgtgccgcccaggcggcggaaggcattgtggttgggcgagaaaatcggcatgcagtggggcagcaattccaggcaaccggctacggcgtggcgcaatggctgctgctgatgggccgcgagcaagttattgcccgctgcgtcgtaaaggctcacatgcacatgcatgccactgccgggaaattgcaggtagggcttggccatgaagctggcgcggtaaccctgcttgagcgccacgccacgggtgctgcggcagaacagggcggcccagtcggcggcgcgcaggccgtcgtcgcagtggccgaagttgatctcgaactggccggggccgatttcggcggtgatcaccgtgatgtcgatgccttggtccttggcggtttgcgccatgtcgtcgagcacgtcgctgaaacgcgacagccgttcgatatgcaggttgggctggtcgtcggcatccccgctgagcgggtcgcgggcaaattgcggcaggccgttttccagctgtttatcgaacaggtagaactccagctcaaacgccaccacggggtgaatgccctggtgctgcaagcgttccagcactttggccaggacttcgcggggttcgaattcgatgggcgcttgggtgccgtccgaggtgatgagcatttgccccaatggctgcgactcccagttcaccggcttgagcgtgcccggcaccaatcggcggttggcgtccgggtcgccatcgttgaagcagtagtcgccaatcttgaacagcccaccctgagcccccagcaataccgcattctgcggcagcttcagcgggctgccggcggcgactttctcaagcatctccaccgggtagcgcttgccatagaaatgcccgggaatatccagggcgatcaggtcgacatagcgcacgtcgggatggttctggcgaaagctgcgtacttcggccagcaacgtggaggattggcttttcacgggtgcagctcctagttgtaaacccacaagacgcgggcgggcaggtcggtcaggttggcgtagcggcagtgggcgaaactggcgaggtggaaactgtcgccggggccgagggtgaccggatcggcctcgccatccacccacagggtcaactcgccttcgagcacaaaaccagcctgttcggcgcggtcgctcatagtctgttcgccgctgttggcaccgggtgccaacaggctgtcgagcatcgagaacgcgccgttcatgctcggcgacaccaggatgtcggtgatgccattggcgtaatacaccgtgcgccgctcgttggggcgggtgacccagtccaccgctttgggtttgggcaggctgtagaaataggtggtgggtacgtccagggcgtggctgatggcggttaaatcggccacagtcgggcgcgacaggccacgttctacctgggacagaaatcccaccgaccgttcgattttttgcgcaagttgggccagggtgagcttcttgtgcttgcgcaggtcgtggatcagcgccgcgagggtggcgagttcttcttgtggggtcatgaaatttatattgaataatttcatgaaaaattacacgattattttcacgctcgcaaaccctatgcacaaacttttgtggcgagggagcttgctcccgctgggcagcgaagcggccccaacccgttcaccgcatgcgttcagtggatgcgcggtgtggctttttggggctgctgcgcagcccagcgggagcaagctccctcgccacaaaggattgggaaatatggggaaactgtattgagcagggacatctcaggtgcctgctaggttgaatggaccattcaaccattcaggggagcaaaggattgcttcacaaacccaattctcatttgttacgacgtggccgttattcagaacctggccgagcttatttggtaactgccgtggtttatcaacgtcgcccggtgtttgccgatctttacctggggcggctattggttgccgagcttaaacgagcccatgaccttggactggtcaactcgctggcctgggtcattatgccggaccaccttcactggttatttgaactgcgagacgcgacgctgcctgaggtgatgaaacgagtgaagtcgtgcagcacactggccatcaaccgagctcgtcgtacacacggagctttctggcagtacggctatcacgatcgtgcggtgcgggccgatgaagaccttatcaaggctgctcgctacatcatcgccaacccactgcgagccggactggtcgagcatgttggcgactactcactctgggacgccgcctggctataacgacgtaccccttgtggcgagggagcttgctcccgctgggcagcgaagcggccccaacccattcaccgcatacgttcagtggatgcgaggtgtggctttttggggctgctgcgcagcccagcgggagcaatctctggccacaggaaacaaggctgaatgattgcgcgccgccgcggtcggaacctgagtacgcaccattaattgaaggagcacccatgaagtcgaaaaccttagccgcttgcttgctggtcgctgccagcttttccactgtcagcgctgtagtgcaggccggcgatacccctcaggaaaccgtgcaaccttcaaacatcaacgctcgcgacttgaaagagggcgaccgtgcgccggatatcctgatgcgcaaggagtcggccatcagcgattggaaaaaacacggcctcaagcagcctgaagaagaaagccagtgggcgcgtgtaggcgacaagtacgtcctgctcaagaccaccaacggcaccatcctcgagattacgccagtcaagaaataatcccgcgggggcacctgctcgttttatgtttcttgcgttaaggtaaccgaccgcgatggtcgcgttacctttgaagaacgagagcaggatgcttgccaccataagaaactacccccgcaccgtgaacctgttgctgtgcgccacgttgctgctgacgctggccaaggccatcacctttccttacctcgtgatctacctcaccagccatttcgccttggacattacccaggtcggcctggtaatcggcagttcgctgatcgtcggttcgctactgagtgtctacggcggtttcctggtcgaccgcatcaatagctatcggctgttgctcggcttgagcctggtgtttgtgctggggtttatcggcacggtgctggcgcagaatatctgggcattctatggctgcttgatcctgatcaacctggcctatgccgtcatcgatattgcggtgaaagccggcttcgccagcctgctgcccgaagacgcgcgcagcgaagtgttttccatcaagtacaccctcaccaatatcggctatgccgtagggccgttctttggcgcgatggtggccaagctggatatcagcctgccgtttattctgtcggcgctgttggggctggttttttttctgctgtatgggcgctggggtgaccgtaacttggccactgtggacaccacgcaaaagccggtgccgtttctcgccgtcgcccgcgttttgctgcaggaccgtcgcctggtgtgcttcaccctcggcggtttactcagcgcggtggtgttcggccagttcacggcctacctgtcgcagtacctggtgaccaccacgaccgccgaatacacctacacggtgatcagcgcggtgctgaccaccaatgccgtgctagtgattgccttgcagtacttgattggccggcgcatctcgcaccgttacctgagccagtggctgatcgctggcttgagcatgttcatgctggggttgatcggattcgggctgtccaccagcgtggtgggctgggtgctggcgatggcggtgttcaccgtcggggagatcatcgtgttcccggccgagtacatgtttatcgaccgaattgccccggaccacctgcggggcatgtattacggggcgcaaaacctgtccaacctcggcgccgcgttggggccggtgctgtgtggcctggtgttggccagcctgccagcccattacatgttctacatgctgggggcgtttatcgttgcaggcggagtgttttatttcatgggagcggcgataaaggcagatcatccagcgtgagcttgccgacgttgttgctttgcagctcgtagcgcaattcatccaccattttcgccacttcctgcggggtctgcaggcggttggtgctgatgccggtcaccaccaagtcgacacgaccggtctcggcgtcgtagaccttgagggtcaaggacgcgtcccggcacagggtgaattcgcacgtcagcggtgacaggccttcttcgatgcagttgcgcagttgagagagggtaaacatgcgggttccttctaggcataaatacgatcccttgaaggttattgcttgcaccgccgctcaataaggcgaattcgcactagtcgcactagtgcatttgcagggtcagggtttgtttttcaggcgcaaatcaccggcaaacagcccgcgttcacgggcccagacgatcgctgcactacggctgtgcacccccagcttggaatacaccgtggccacatggttacgcacggtgttgggcgccagtttcaggcgcgaggcgatctctttgtccgccaggccctcgcagatcaggcccaacacatcgcgctcgcgggcggtgaggtcggtgaaggaaacgttcggcaggttggggctgttgacgctcttagcgttggccagcttctcgatcagggtctggctgaaccaggacgcgtcctgcatgacttcctcgatggccgccaccagttccagctccgagcgtttgcgctcggtaatgttcatcagcaccatcaggtagcagggtacgtcctcaataaccacggtgtcggcggacaccacgcagtcgatcacctcgttgcctttcttgcgtaccttgaggtcctggccttcaaggttgccggctttttccagggtggcgaacaactgcgcgccggcctgggggctgtcgatgaagttgatgtcttcgatggatttgccgatcagttcttcgctgatgtagccggtgatgctcatgaaggcttcgttgatgtccaccacctggcggttgtcggcactgcacaccagggtcggcacgggcgtcagacggaaggatttggcgaagcgctcttcgctctggcgcagggcgatttcggctttgcgccgcggctcaaggtccgtgaaggaaaacagcatgcagtcttcctcgttcatgtccaacggttggccggcgacgatcaccagtttgctgccaccttcgggcagcctcagttcggcctgcatctgcgggatggtcgcgccttcgcccaggcgctggatcgccaggtccttgcgctcggcctgttccagcacatccagctcatacacggatttgccgatgacctggtcgcggttatagccggtcatctccaaaaaaccctggttgaccttgatgtagcgcaagtcgctgaggcggcagatcacggcgggcgccgggttggcgttgaaggttttctcgaagcgttgctcggcgctggcccattcggtggcgtcgctgaggatcagcaccagcaactccggctcaccctgggcgtcggtcagcaccaggctgcgcaggcgatgcacccaactgcggtgttcgtcgtcggcgggtgtgacctccaccaccacatcgctgaactcttcaccggcggccacgcggctgagggggtagctgtccagtgccaaggggtggttgttgcggtagcgcagggcaaagcgcttggcgtacgcctcggtattggcgcccagttccttgacctcgctgaccccatgcatggtcaacgccgcttcattggcccagagaatggtctggtcgacctcggccaggatcacaccgtcggacagcccggagatgatggtttgcagttggcggcggttggtttctttggcgagaacatcctgggtcataacgtctccgattagggcagggcaaggcacattgggttacgacatcccggcttcaggatagtgcagagtaattgcctacggggcagtgcgaatgcaccaggctgcctggtgcatatgggccaggactgaacgtatgtcgtttcgccacactcacacccatcaaggcgcattgccttgctcctcaatttgaaaaggacctttgtatgaccactgtctatgaatccaatcgatcgctgtttcgtgtgtcgtggagctcggtattggccggtagtgcaatcgcactggtcacctacctggtcttgagtgtgttgggcaccgccattggcgccagtgccgttgacccgatggaagcgggcaacccgttgagcggttttggcacgggtgcgggtatctggttgtttgtatcgacactggtcgccatcgcattgggcgcgttcgtggccggccgcacggcaccggatcgtggcggcctgcatggggtgctgacctggaccctgaccaccttgctcaccacttggctgctggcgggcctggcgtccagcgtggtcggcactgccggcaacgtggtgggcaaaggcctgtccgcagctggcagtggcattgctgccgccgcgccggggattggcaatagcatcaagcagcagttgaacgagcagggcatcgagctggactggaacagcctgcaaggccaactggataccttgctcaagcagagcggcaaggctgagctggaccctgccaatgttgagcaaaaagccgatcaggcagcagccgatggcaagcagtcggccaccgatgcagcgaccaaccctgcccaggccggtgatgagctcaagcagtggttcgaacgtgtgaaagcgtccggcgagccagccctgaatgcagcggataaagaggcgctggtcaacatcgtcgcggcccgcactggcaagagcaaagaagaagccacccagatcgtcgacaactatgcccaggcttatcagcaagccatgcaaaaggtcgatgagctgaaaaaacaggcggaacagaaagcccgtgaagccggtgaagtcgcagccaagcaactgtcccgcgcggcctggagcaccttggccatgctgctgttgggcgcggccttgagcttctttatcggtcgtatcgcgctgactacccgtcgcgtgcccttggcttaaaactgtctgcggcaaggacgccgcctgtgtgaaggggtaaaatgctggcattttacccttatcccacaaaggtgccccttgagcgcaggcaaagccgtcggactgttattactcacttccctgttggcggcgtgcggcacctcgccgccacgcacgcccaacgacctctgcggtatcttgcgcgaaaaagacgactggtacgacgccgccaaagtcacgcaaaagcgttggggcgtaccgatccaggtgccgttcgcgatcatgtatcaggagtcgggctttcgccacgacgccaagaccccgcgtaaatacctgctgtggatcattccctggggccgcgtctccaccgcttccggctatgcccaggccaaggatgaagtgtggaacgactaccgcaaagccaccggccgcagcggcgctgatcgcgaagacttcgacgacgccatcgactttatcggctggtacatggacaagacctacaccatcaacggtgtctacaaatacgacgcctatggtcagtacctgaactaccacgaaggctggggcggctaccgccagcgcacctacgccagcaaagcctggctgccaccggtggcaagcaaggtgcaagcgcgttcgcagatgtatgcgcgccaatatgccgggtgcaaggatgagttggggcgagggttctggagccggttctggcattggttgtaaaggcttctggatgcatgcagattcaattgtgggagctggcttgcctgcgaaagcggtagtgcagacacagatgcattgactgacacgccgccttcgcaggcaagccagctcccacattggattgtgttaacgcggctgtatgcattccagcgaacggttcaccatcacgctggccattcccctgcacttgccaaacccatccgattctgggaaaaccccagcccttcaccccttcaatgagaaccccatgagcaacgacgaactgcaggtcaccgacatccgcctgggcgacggcaaagccgtggtcaagggcgcgctgatcaccacccaatacaccggcaccctggaagatggcacggtgttcgattcctcctgggagcggggcaaaccgttccagtgcgtgatcggcactggccgcgtgatcaaggggtgggaccagggcttgatgggcatgcaggttggcggcgtgcgcacgttgtatgtaccggcgcacctggcctatggcgagcgctcgatgggcgcgcatatcaaacccaacagtaacctgcgtttcgagatcgaattgttggaagtgctgacgcgggatgattgaggtggccgaacatggacggtgcttggcgttatgcgcaggcgctgcctgagcgcttcagttctggctcttcaaccctgatcccaaacctgcccgacagctcatttcgccccttgggcgtcaccgccagcgcccggctatcaaggtcctggataacccatttgcggctgatgacggcctgtagcacagcggcccccagtgcgccggcgaggtgagggcggcgcatgctccagtccaggcatgcgcaagcgaaacgacgccgctgcgcccttacggtttctacctcgataccgaggcctgtcatcgctttttcgccctccacgctgagctgatacgtaccgtcacccgcgtccgacatgctcagccagccggagtcgaggaaatagtcgtgcagttgtaccgccaaggaccccgccatgtggtcataacaggttcgcgcgagctgcaaccgactgggggtagtcgaaacaaacccggtctgagcgtttcggctgatcaccatgagggcttcgattgcttgggccacgtgcgcgtctgtcaggctgaagtagcggtgcctgccctgggtgtgcagttttatcaaaccgtcctctttcagccttgccaagtgcgcgctcgccgtagaagcactgacgtcggcgatgacggccagttcggtactggtgcgggcgtggccgtccatcagcgagcacagcattttcgtccttgcaggttcggcaatcgcgccggcgacacgcgaaatggcggtgtcattgctttgggaatccatatttcgttcctgagcgaattgtcggtgtgacggttgttcgatagtagccgttctttgcgaaaaggactgccaaaatgacgccgtttgaagccgttacccatgccgacccctacgattattacgcacgcctcagacgacacagtgaactggtctttgatgcagatcttggtttatggattgccagtggcgccagcgttgtcgaggccatcctggagcatcccgactgccttgtacgcccactgcacgagccgattccagcggccattgctcaaggcgcggcaggcgatatctttggtcgtttgatgcgtatgaacgagggggcgcaacaccgctgcccccggatggttatcgagccggccttgggctcgttaggaaccgaaaatctcgcaggcattgtggcgcaggttgtcgagacattggatgaccccgtcggtaacccgaacgagtggatgttcaggttaccggtttcggtcattgcgaccttgataggttttgcacccagccagttgcaggaagtcgcgcaactgacatgggagtttgtcgcctgcctatcgccattgagcgacgaagctcaactcagtgcagcccattgcggggcggctcggctgaggcagatgtttcaggtgctgctgagtaacgatgataagggcagcggcgtgttggagcgtctttatggcgaataccaagcctcagcctggaaagacgatgaggcgttgatagcgaatctgattgggctgttgtcacagacctgcgaagccactgccggcctgatcggcaacaccctcatagcgctccaacgaaaccctgacctgcaagctaccccgatgcgcgtcgctgagtgggtggcagaggtagcgcgccacgactcaccggtacaaaacacccggcgcttcgttgcacagcgctgcacgattggcggcagcgttctagaggcgggcgataccgttttactattgcttgctgctgccaaccgagatcccgccgtcaacccagaccccgacagcttcttgctcaaacgaactcaacgacgaaccttcagcttcggcgcaggcaggcatcaatgcccaggccagcccttggcattggctattgcctcagaggtgatttcggcattcttgcatcgacggccagacttatctgcccttgcttatcgctgggattatctgccttcccttaatggccgcatcccgaggttctaccgtgatgaggagactcaacaatgatcgctgttatttttgaagcctggccacatgaggagcactaccagcgttatctcgacctcgctgccgaactcaagcctctgctcgctcaaatcgatggctttatttcagttgagcgtttccagagcctgagtgaaccttcaaaactactctccctatcattctggcgtgacgaggcagccattcagcagtggcgcagccttgagctacatcgagccgctcagtcaacaggccgtcggcaggtttttgctgactaccacctgcgcattgcccaggtggtgcgcgattacagtctcgaggaccgtgctcaagcgccgaccgacagcaggcaggcgcatgagtaaaagcagcacaccgccttctgtaggagcgagcccgctcgcgaaaaactcgaaggcgccgcgttcacacagcaagcacgcgttatcgttggcgtttttcgcgagcaagctcgctcctacggttgttacctgaacccatcctgaagaattttcttattcaccatgcaggcactttcctacggtttactccgccaacatcggggcgtaagcttcgcgcgttttcatcaatagcggagaccctcagtgggtacttgttcgagtgacagtcgtcggccggtttcggtaaccggcctcttggcaaggtaacgcgcattttccagatgccgttgtctcgcctcacaaagcgagaagcggcatcccggcggtggccagtcctggcgcctgcctgattccctctcatcgacgctgaccagcacctgggtaacgcctggatgctacggacgcgcctgcctgttacggcgggcgggccaggttcggctgtgcctgtgtgacgggcgcggtgtggacgggcagtacctgcacgacggtttttcctcgcgcaggagttacaccatgaacctcactttgctcaaagagttcttcgccggtttcctgcggacccggcatatcgcccggcattttcgccgcctggcgatgctggagaccgtgaccgacgccagcgtcagccgcgaagtaccgcctagcctggcgcagacactggtggcatctgccaaccgcagcaccgtgcaattgctgggtgtactgggcagccacgccgagggcctgaacacccaggaagccgacgccctgcgtatgcaatacggcctcaatgaagtcgagcacgagcagccgctgccgtggtgggtgcacctgtggcattgctacaagaaccctttcaacctgctgctgaccctgttggcggtgatctcctggctgaccgaagacatgaaggccgccacggtgattttctccatggtggtgctctcgaccctgttgcgcttctggcaggaggccaagtcgaacaaggccgccgatgccttgaaggccatggtgagcaataccgcgacggtgctgcgccgcgatgctgccaagcgcattgaactgccgatcaagcaactggtgccgggcgatctgattgtgttgtcggccggcgacatgatccccgcggactgccgcgtgctcagcgccaaggacttgttcgtcagccaggcggcgatgaccggtgaatccatgccagtggagaagttcgcccaccagcaggacgcccacacacgcaacccgctggaactggagaatattctgttcatgggcaccaacgtggtgtccggcgccgccacggcggtggtcctggccaccggcaacagcacgtactttggtgccctggcgcaacgcgtcacggcgacggaccgtgcgaccacctcgttccagcagggggtcaacaaggtcagttggttgctgattcgctttatgttcgtgatggcgccgctggtgctgttcatcaacgggttcactaaaggcgactggaccgaggcgttgttgtttgcgctgtcgatagcggtgggcctgaccccggaaatgctgcccatgatcgtcacctcgaccctggccaagggtgcggtatttctgtcgcgcaagaaggtgatcgtcaagcgcctggacgcgatccagaacttcggcgcgatggacgtgctgtgcaccgacaaaaccggcacgctcacccaggacaagattttcctggcgcgccatgtggacgtgtggggccaggaagcggacgacgtgctggaaatggcctacctcaacagctactaccagaccggcttgaaaaacctgttggatgtggccgtgcttgagcatgtggacatccatcgcgagctgaaagtcggcaccgcgttccacaaggttgacgagattcccttcgacttcaaccgccgccgcatgtcggtggtggtggccgagcagcaccaaccgcacctgttgatctgcaagggggcggtggaagagattttgtcggtatgcaaccgcgtgcgccatggcgacgtcgatgaagtgctgaccgacgaactgctggcgcgcattcgccaggtgaccgcagcctttaacgaagaagggctgcgggtggtggcggtcgcggcgcagccgatgcaggcaggacgagacacctacaccctggccgatgagaacaacctgacgctgatcggctacgtggcgtttctcgacccacccaaagagagcaccgcacccgccctcaaggccctgaaggcccacggcgtggcggtcaaagtgttgaccggcgacaacgaactggtcacggcgaagatctgccgcgaagtgggcctggaacaacaaggcttgctgatgggcaacgacatcgaagccatgagcgacgccgaactggccctggccgtggaaactaccaatgtgtttgccaagctcacccccagccacaaggaacgcatcgtgcgcctgctcaaggacaacgggcatgtggtgggctttatgggcgatggcatcaacgatgctccggcgttgcgcacggcggatatcggtatttcggtggacagtgcggtggacatcgccaaggaagcggccgacatcatcctgctggagaagagcctgatgatcctggaagagggcgtactggaaggccggcgcaccttcgccaacatgctcaagtacatcaagatgaccgccagttccaacttcggcaacgtgttctcggtgttggtggccagtgccttcatcccgtttttgccgatgctgccgatgcacctgctggtgcaaaacctgctgtatgacatctcgcagatcgcgattccgttcgacaacgtcgatgacgagatgcttgccacgccacaacgctggcagccaggcgaggtggggcgcttcatgctgtttttcgggccgatcagttcgatcttcgacatcaccacgttcgcactcatgtggtatgtgtttgatgccaacacgccagaccaccagacgctgttccaatccggctggtttgtggtggggctgctgacccagaccctgatcgtgcacatgatccgcaccccgaaaatcccgtttctgcaaagccgtgcagcgctgccgttgatgctgatgaccggcgtgatcatggccgtggggattttcctgccgatggggccgttggcgcattacttcaaattgcaggcgctgccgtcgctgtactttgtgttcctgccggtgattttgctggcgtacatggcgctgacccaagcggtgaaaggctactacatccgcaggtttggctggcagtagtgagtgccatgcaacaccgcaaaccctgtgggagccgggcttgcccgcgatggcggtgtatcagtcgccagattcattggccggtgtaccgctatcgcaggcaagccagctcccacaggaacccacggtgttttccaatttgtcgctgcattcatggagattttttatgcaggcaatcaacaacatcaacctcaactccctggtcgacaccgtcgtcagcctcagcgcggcatttatcctcggtggcttgatcggtttcgagcgccaatatcgccagcgcaccgcggggctgcgcaccaatgtgctggtggcggtaggcgcggcgatctttgtcgacatggccaaccggctcggtggtgcggaaggcgcggtgcgcgtggtcgcttacgtggtgtcgggcatcggctttttgggggcgggtgtgatcatgcgggaagagggcaatgtacgcgggcttaacactgccgcgaccctctgggcttcagcggcggtgggcgcctgtgccggcgccgacctgatccttgaggcattgctgggtacgctgtttgtgctggcggccaacaccttgctgcggccgatcgtcaataacatcaaccgccaacccttggacgtggtgtcggcagaggttaccaatatcctttacgtgattgcgcgacgcagtcagcaacaggccgtgatggtgttgctggaagccgagttggcacgctgcaactacccagccagtgatgtcgatgtgcggccgttcggcagcgacgaagtggaaatcgaggccatcctggccgccacgtcggtggatggtgatgagctggatgcactggtagcgcgcctctcaacttcaaccctggtggtacaggctttctggagcccgagtactaccgactgaccctgatgagttagccaggattggctaagcttgattgtggaaaaatcctacatctagtccggattatcccttcagttgaaacatcattgcgttgctaaggttgggcacttgcggctgttgggtcattgaggtccggcgtccgtgattatgctgagttaattgaaggggccagacacggcttggttaccgtactgataaggcagcgccgctcgtcggaactgtcatttctcacaggtacccagatccggtgtgatgtgtaagggtattttgtccacatagggaagttttatgagcaaagcattaattgtggatgaccatccgtttatccgggcgacggtcaaacacctcttgcagttggagggttttgttgaaatttttcaggcaggggatggcgcagatgccatgcaattggcgagggagcaacgtcccgagctgatcatcctcgacctggcgatgcctaaattaggcgggttggaggtcatcagccggatcaaggcgttgggcttgccgtgcaagattctggtgttgacgtcctacctggcagtgttcttttccacccgctgcatgcgcgccggcgccatggggttcgtcgccaagaccggcgaactggatgagctgcaaaaggctatcaaggcgatcatgtcgggctacagctgcttccccagtttgccgaccagttcggtgcggcgcgacgatttgcaagaaacagaacggcagatgatcgaatgtttgtctgaccgcgaactcaccgtactgcaaatgctcgccctagggttgggcaacaaggaaatcgccgagcaaatgctgctgagtcacaagaccatcagtacctacaagactcgactcaaggagaagttgcgaatgtcctcggtagtgcacttatccaagtttgcccagcgcaaccatctgatctgatctgaaatgatcgccaccgtgtttatcaggttcgtcacgatcctttggatgagcctgttacctctgatcgcggtggcccttgaagagcctcacgctttgcggctgttggggcactctcatatcgaaaccccgcaagtggtgcttgacgaggccgattggcgttggctgcgtgagcgacgctcgttgctgatgggcgtttcggcgcccgattacgcaccttttgacttgaccaataacaacgacgaactcgaagggatcacggctgattttgccgcattggtcggccaggccctgcatatctccatcgaggttcggcgttacgacacccgcgatgaggtggtcgaggcgctgaagcagggggcggtggatttcctcggttccgccaatggctatgaagcggccgacccgcaactgctgctgtctcgctcttatgccaacgaccaaccgaccctggtgacccgcagcggtgacagccaggtattgaatgacggcctggccggcaagcgcgtggcaatgctctatcactacatgcagcccgacgccgtacgggcgttttaccccaaagcccagttggaactgtttgcctcgaccttcgaagccattggcgccgtggcgtttggtcgtgccgacgtctacctgggggatgccatcagcagcaattacctgatcaatcgcaaccacctcaataatgtacgcatggcggatttttccggcctggaagtcaacccgtttgcgtttgccgtcacccgggaaaacacgcgtttgctgcccatcctcaatgccgcgctggaggcgattcccgccagcgagcagatggaaatcctgcgccgctggagcggaggtaacctgggcataatcggcgttgaccggctgcacttgagcgccagtgagcaacgctgggtgcagaaaaacccacgggtcagggtcgcggtgctcaatgacttcctaccgttatcttttattggtggtcgaggtcaattcgaagggttgagtgccgaggtgttatcgcgcatcagcttgcgcaccggcttgaagttcgatgtggtgccaggcagttcgttgccgcgccaggtcaacatcgtcagtgcggggacggcggacatgctggcggttatcacccccagtgtggagcgggccgaaaaagtacgctttacccggccctacctgaccaacccctttgtgctggtaacccgtgacagtccacacagcccgctcacgttggaggagatggttggcaaacgcttggccatggtggttggcaatggcctgcacgatgagatagcgcagaattttccaggcgtgatgtttgtcgatgtggagaacccccagcaagccatggcgctggtggccaacggtgacgccgatggtgcggtcaactcattgatcagcgcgcgctatttgatcagccggtattaccgcgaccgcttgcgtgtcaccagtacggtcggcactgagcctgcacgcgtgacctttggggtcaaccgcagtcagttggagttgtattcgatcctcgacaaggcgctgctgagtatcaccccgcaggaaatggacgaattgattggccagtggcgcagcgaggtcatcatcgaggacagttactggttgcgttatcgcaacgtgattcttcagggttttgggttggcggcgctgttgttggccgtcacgctgggctgggccatttacctgcgcagcctgattcgtaagcggctacaggccgagcgagcgctgagcgatcagatgcggtttatgagcgtattgatcgacggcacgccgcacccgatttacgtgcgtgaccgccaagggcggttgatggcctgcaataacgcctacctcgacgtgtttggctacaagcttgaagacgtgatcggcaggacggtggtggaaaccgacgtcgaaaacccgccacaggcccagtcgtttcatcaggattacctgcgcttgatggcggggggcgagccgcagattcatgaccgaatactcaaggtgcccaatggcgatgtgttgaccatttaccaatggatgctgccgtatcgcgacggcgacgagaaagtggtgggcatgattgccggttgggtcgacgtgagcgagcggcatcggttgctcggccagctacaggaagccaaggacgatgccgatgccgccaatcgcgccaagactaccttcctggcgaccatgagccacgagatccgcacgcccatgaacgccgtaatcggcatgatcgagctggcgttgaaaaatgccgagcaggggcgggtcgaccgcgacgccctggaggtggcttcggtggcttcgcggggcatgctggagttgatcggcgatattctcgatatcgcgcgcattgagtctgggcacttgtcgctgaccctggagcccgccaacctgcatgagctgttagcgtcggtcgcgcgcgtgttcgaggggctggcccgcgccaaggggctggcgctgcaggttgagctggacccgttgattgaccgggcggtgctggtcgacccgctgcgattcaagcaggtggtatcgaaccttttgagcaatgccatcaagttcacttctcatgggcaggtcagtctggttgcgcaggcggtggtcgaggacgatcgcttggccgtccagttatgggtgcaagacaccggcatcggaatcagcatcgccgatcagcagcggttgttcagtgtgtttatccagggcagcaataaccagcagtcggcacgtagcgggtctgggctggggttggtgatcagccgcagcttgtgtgaaatgatgggtggtcaattgcacttgagtagcgtgctggggcacggtactcgggtggacgtgacgttgaccctggccatgtccgccacgctgccggccccggttgagcctgcgcaagaggcggcgcctgagggccgtgcgctgaagattctggtggtggacgactacccggccaaccgcttgctgctggctcgacagttgagctttctgggccaccatatcgtcacggccgaagacggtgttcaagggcttgaacagtggcgagcggggcagttcgacggcgtcattaccgattgcaacatgccgttcaagaacggctatcagctggcacaggagattcgcgcgcaagagcgtgaacagggtctggaaccctgcctgttgctggggttcaccgccaacgcacaaccggaggaagccgagcgctgccggcaggcgggcatggatggctgcctgttcaagccaaccgggcttgacgacttgcggtcggcgctggcctcgcgtgtggccgacgcgggcccgcagcccgtggcgacatttgacttgagcacattggtcgcgctgaccggcgatgatcacgctgcgcttgtcgaattgctggcgccgttgctcgaaagcctggaggcagaccgtgccttactgccgcgcctggccagccaggcagattttgccaagctgcacgacctggctcaccgtgccaagggcggcgcgcggatggtcaaggcaaacctattgatcagtgggtgtgaagcattggaggcagtgtgtgaacagcgcgaccctcaggcattggggccagcggttgagggcgtggctgaagcgatcgatgttttgcgtcatggcttgagcgcttattgcaatcagccttgactgcggttgatcgccattcgggaaatttgggaaaactcttacgcaaaccgggaacatgcctgattttgtcgtcggcatatgtctggaaaatgggcagcgctcactgccgagcactgcctgccaggggtttgccatgccgaacaaagcactgaccatcctgattgccgatgaacagcatctgcaacgcctgtacatcgagaaaatgctcaaccggttgggctattaccggatcgtgccggtgcaaacgttcgaagaggtgcggattcttaccgccattcctgccgaacccttcgatgtgctgataatccatgccgggctgatggcccaagcctatgaacctcagccccaggtgcgtcatgtactggtctacgaacatctggacctgggcgccccgtgcggtgtaacgccggccgtgcgggtgcgcctgccgggcgtgccggaccacgtcaacctcgaacacttcatggacatcgtcgacccctgcgagactgcccacggcctgcgggtgttgccgtggttgcgggagttgtctcgcatgccggtggcccgggcctagtccacagcgattgcttgtaggagcgagcttgctcgcgaaaaactcgcaggcgccgcgtttattcaggaagcgcgcgttaccgttgacgtttttcgcgagcaagcgcgctcctacaagagggcgcttcaaggggggactgtatgccactaagtttgcgcgccagttcaatcgccaccttgccgctgtcggcgccgggtactaaatgggtaaacggaatatcgatcatccggttctcacgcaccgctcgcagcgtcgatagcaccgggtcggtggtcaacaattggcgcttgcggctggcgggggaccagagggcgtcggccaatagaatgatgtcagggtcttttgtcagcaaagtttcgctgttcacggtcacccgcgaaagaggtgcatcagccagcacgttacggccacccgatgccgccagcagggcggtgacaaaccctcgttgaccttcactggcgaggccgttgacctcactgtccaagtaaaataccgataccggttgggcgttgtcagccaatgcctgggcatgttgcaggtcggcgtccagtgcgtcgctcagggcctgggcgcgttgcgatttgtgcagcagggcgccaagggtgagcaggtcctggcggatgtgctcgaagtaatccaggttgtgcccggcgcacgcggactccagcaggtaggacgccacgccgttatcggccaggcccgtgcgtgagctaacgcccttgccgaacgcgctggcgaaaccgcccaccaccaagtcggggcgctgtgcatacagcacctcgctggagggatattgggcggcaatcaccggcacttcgaaataccggccctgtcgatgcgctttgtcactgtcgtccagataggccacgcacaccattgaaggcctggcatccagcgccagcaagaggtcggccgcgtgttgattgagggcgacgatgcgcgagggtggcgcgtgtggcagtgcccaggcctgggcgcaattggtgtaattgtctgccagcaccggtgttgcgcagagcggggcaatcaagcatacgcaccacattttcatgcgcgctccttgagcagtagatcgtcaaccacttcaccgcctgccaggtgcatatccaccaggcgtatcacatccgccttgctgtgcacgccgtaccagcagcgctgcgggtaaaccgtgagcaccggcccgaggttgcaagggaactggcaatgggtgcgggtcagcagcacgccgtcgggcacttcgatgcgttgcagctccagcaaccggcggcgtagggttttccacagttgcaaggctccacgctgggtgcagcgcgggccggtgcacaggaacacatggtggctgtggccaggaatttgcgaccagtcggggtgggtgtcgaccccgtcgattggcgtgatgtcagccatcagaagcgatacctgtaacgcacctctgcggtgaaggggcggccgaggttgtcgacgttgttggcgcgactggtgacgtagtcgcggtcgaacaggttttccaccagcaggctcaaacgatgccggtgggcactgtccagatagcgataggcgtcggcgtccaccacagaataatgcccgtactcgacctgcttggcgctgatgacatcgcggatataacgcagtgccgcgcctgcaccccataggcggttttgcgattcaaaaccgatgcgtgagcgggcaaaaaaactgggaatatcgttaagggtgaccccggcgcgggattcggtcaggttgcgggtcatgtcggcctgcacgctccattggtcgttgagcgccaacctggcgtcggcctcgaaaccgcgcatctggatctggccctgaccattgacccactgcacatcgtccagagtgatcaggtcggtgatcttgcgtttgaacacggtgacgctggcgctgaaatcgcgttccgcaagttgccctgtgtagtcaaggcccagttcggcgttgcggcttttctctggcttgaggtggcggttgccctgttcgtccgcttcgttgacgaacagctgttcggcattgggcagcttgtaggcggtgccgtattggccgcgcaaggcccagtgatcgttgaggttgtagagggacgtgagcatgccgacggtggcactgtcaccgccgctcatggcctcgtggcgtacgccgaggctggggtgccagtcgggcagggcgtcgatctgcgggcgcagttggctatacagcgcgtgggcctgggctttgttgtcgtcgatcaccagcacatcgtcctggcccttgaaccattggttgtcgctgccgacgatcactacatggccgcccggcaactcggctttgccttcggcttgcacgccccagtcggtgaagccccagtagtcgttatggttgataacctgggtaccaccaccgtctaggttgttgaggcgggtatagcgggtatcccaatcgttgatgtggcccttgacgaaataactcaggcgttcgtcgaggctttgctcgaacgtggctgtggcgatttgctgtacacggtcgttggtagttttgtgggaggctaccggacgggcgaaatccaggttggcgtcggcgtattgatagaacagttccaggcgcgaatcatcgccaaaagattgaacggccttggtaccgaaggtagtgacttcgtaagagcgtttcttgtccgtgacatttttcatatcgcgattgcgaaacggctggtagccctcggacgcattgcggctgacgtaggccagcacgcccaggtcgccccagccgttgctgaaaatcttctcgacccgtgcgtcacccgtggtgccgccgaaggtgtcgaggcccatattcacttcgccggcagccgcccgcgtttgtgggctgcgagtcacgatgttgatcacgcccgataccgcctgggtaccgaacagcaggctctggccgcccttgagcacttcgatgcgttcaatggcattggccggcagggtgtcgaggtacaggccaccgtacaggcggttgttcaagcgcacgccatcgagcaggatcagggtgtcatcgttgcgcccgccgagcagggaataggtgccatagtcgaacgggccgttcttcggcgccacatacagcccgggaatgaacatttgcatcacccgagacacgtcggctgaagggccggcccgctcgatctgttcgcggctgaccacgttgacgttactgccgtactgggccatggccgcaactgtgctggactccactgagggcgccgaaacgatttgcgggttgagcaccaagggagtgttgtcagccagcagcaacgggctgaacaggcaactgatcaagggagtgaatgaatgtcggatcatagtcttctcgaaagtatcttcgcagaagcacgcaagagaaggcatcgagcacacgccaataccggcccatgcccgcccaccgcaggagtttgccaaacagaaattccaggccggtctccgggctcatgcgtatggataccttcaccttcccatggcgcgagggccacagtggtgtgtcgaagggatcacgcatctaccgttgcgggggcagcaccggacttgctcaatatgagcgtaccggtttcccgtttcaccccaagcacggcggcagggggcacctgaaacaggcgggcatctgaacactcgcacgagtgctcgtcaactttcccgcctctcccagctgtatgtttttcaccgatcagtcggctttgccgtgctcccgcaaccgctcggcggcactgcgtaacaactgctcggtcgcgtcccaacccaggcaaccatcggtcaccgaaacgccgtatttcatcgacgcgctcagcggctggcagccttcgaacaggtgactctcaagcatcatgccgaccagcgaggtatcgccttgcaagcgctgctccagcacgtcattgaataccgccggttggcgcagcgggttcttgccgctgttggcatggctgcaatcgaccatgatccgcgccgccaccttggacttggccaggtcatgctttacgtcggccacgctttgcgcatcgtagttgggcccacggtggccgccacgcagcaccaggtgggtgtcggggttgccgggggtctggatgatcgccggatggccttggctgtcgacgccgaaatgacgatgcgggtgagacgctgaacgcatcgcatcgcaggcaatggcgacgccaccgtcggtgccgttcttgaagcccacgggcatgcccaggccgctggccatttcgcggtgaatctgcgattcggtagtgcgtgcgccaatggcgacccaagtgagcaggtcatcgaagtagccggcggccatgggttgcagcaactcggtggccaccggcaggcccaggcgcagcatttcacgcatcagttcgcgggacagggtcaggccggcggccatgtcatcgctgccgtccaggtgcgggtcgtaggccaggcctttccaacccaccgtggtgcgcggtttctcgacgtaggcacggatcaccagcagcatctggtcgctgacttcaagcgcgagcttcttcagattgcgcgcgtattccatggccgattccgggtcgtggatcgagcacgggccgacaatcaccagcaagcgtgaatcttcaccattgaggatggcgcgtacggcttggcgatgggcgtggacttgttcattgaggaacgggctgagcgggagttggtgcttgagttcaagagcgctgggcaaacgttgggtcagggcttcattggcgctgttgagggcagagacgggcaaagcggcgacggaggagttcatattcaaggcttcctgggcaagcggcgggcgattcccgcacgcttggcctactggggtgttcgacaattggccgtatcggctacgtgtgttggcttgccaccacggggtgaccggtcggaggcggcaggctgtcccgaacggagctggctaaatcgccatgcagtgcaagtgtcgtagcggtaataggtggtgaagttcatggtgtgattcctttaagtgatcgtgagcaaacaggttgtcaggcgctgaaaaaacaaaacccccggtcggggagccgaccgggggtttagatttctctggtaggcgaccccttgagtagtgggcgccgatttcaggtatcaggcgcgccagtggctaaaccaatacccaaaataaaagccggccagtgcgctcgaaccgttcacacgggtagccgacaccgagcgcaaggcgctggcagcagggcaaacctgagtgtgggtgagtggcaacatggggctctccaaatgatggggggagcttactagaggcgtgcaggtggattcaatcagtaatttctattgtgtggcggtacttaccgctatgggcataggtatctacacaactttgctgcgacgctggacctgtggcgagggagcttgctcccgtgacggactgacaggcgacgcatctctacctgacaccctggatccaaatgtgggagctggcttgcctgcgatgacggcctgccagtcgacacagggtgtcagaccgagtacatatccattcctgcggtaacggccacttagggttccgccctgacggcggctnnnnnnnnnnnnnnnnnnnnnnnnnnnnnnnnnnnnnnnntaggctcggtgtgcccgtaatccgccagtgatttggggggccgccgccacgcgccatccatggcgcggggcggctaaaccggcatccctgccggtttaccccccaaatccctgtcgaattccggccagcgtggtttgacggggcgcttaagatcaagatcaaaagcagatcaaaagcagatcaaaagcagatcaaaagcagatcaaaagcagatcaaaagcagatcaaaagcagatcaaaagcagatcaaaagcagatcaagagcgactcgcttcgcatcgtggttaccgtccgctgctacagtccactcagttgtgtagatacctatgccgttatgggcaagtgtggatatgctgacggctctcaaacaatgattgccaggacgcgaccatgactgccttgacccttgctgcggcgcaaaccgtttccatcccgggcgatgtcgctgccaatatccagcggcacctggcgttgatgtgggccgcggctgaacagggcgtgcaatgcctggtgtttccagaactgtcactgaccggctacgagccgttcctggcggccgacttggccatcgccccgcaagacgccgtattggcgccgttgcgtgagctggcgcgggagctgcggttgacggccgtggtgggcatgccggtgcggttggcgccacaagcaggcgtgctgatcggcgcgttggtgctgggggcggacggctcagtcggcgtctacaccaagcagcacttgcaccccggtgaggagctggcatttgctgcggggcagggcggtgaggtcttggcattcggagatgaccgcatagcattggcggtgtgtgcggacttttcccaggccagccatccacgccaagcggcggcagcgggcgccacagtgtatgccgcaagcgtactgatcagcgaggcaggctacgcggcggacagtgctttgcttgaaggctatgcggccgagcatggcctgttggtactgatggctaaccacggtggcccatctggaggctgggcttgtgccggtcgcagtgcgatctggaccgccgatggcaacttgcttgttgccgcccccggtgtcggcgacgcgttggtgatcgcccgtcgcgacggcgggcagtggaccggccaagtggtcgccctctgaatgaggtttcatttgcgccgggccatcgagcaggacctgccgtttgcccgcaccctgacccagcaggccatgagccattactaccgtcagaacggcttgttgtggtccagcgacggcttcgacgtggcctgggcgggccgcgagaactggctgatctgcaacgatgacgtcgtcatgggctttatcagcctgagccgcgatggcaaggccctgtatatccgcgagctgcacctgctggaatgctgccgcaagcagggcgcgggcacatgggtgctggagcaaatggcgttcaaggcacgcgtcgagggcctgggctttctacgtttgacggtgttcaagaccaacccggcaagaaggctgtatcagcgcttggggttgagcattgtcggtgaagaggatggcttctggcggatggagcgtgagtgtcgcgcactcacatcggactaaaacaggcacgtcctacaaataagcgcatactgctgtcagttagtgctttgttcgtcgtgggattgagctcttggctcatccacgataacgccctctttcatgcccagaagtaccgccactttatgggcttctccacgccgtccctttttgcgcccggagagcacttgatacgtggttgccgggtctacgccatgctcccgggcgaacgcttgaactgactttccttgatgttccagccaggccttggcttgtgcagcagtacggattccgggcatagttcaaaaccgttcaagtttgtttaacgaagtgatggtgtgacacctcttggggtgtgccaatttaggatcatacatccaaatgagtggaatcggttcgcgcttaaggcaagaaagagagcgacttggcctgtcgcagaaagtttttggagaaattggaggcgttgaagcgaacgcccaaggcaaatatgaaagcggtggtcgtgcacccaaggccgactatttgtctcgcgtcgccgaaaaaggtgtggatatcctgtacgtgttgaccggcagcccaacgccgatccagctggataacctgagcaagatcgaagagaaagtgctgggcaattaccgagcgatgttcaaggaagaccaggacgcaatccgtcgcttgaccagtaccttggctgagcattcatccgtagtgaacggaaaagccaagtcgcccccccaggaatcctgacctttagcccaggaaacagggctgttcgccagccggcgaacagccgcagcacgtttaatctctatatatatgacacttgcaactaggtctgcgccttggttttttgctaaggtgttcagcaacctataagaccatatcgcgaggtgtctgcttgattagggtgctagtagtcgatgaccatgatctcgttcgtacaggcattacacgaatgctggctgacatcgacggcctgcaagtagtcggccaggcggagtcgggggaggaatccctgatcaaggcccgggagttgaagcccgatgtggtactgatggacgtcaagatgcctgggattggcggtcttggtgccacgaccaagttattgcgcagccatccggacatcaaggtcgtggtggtcacggtgtgcgaggaagacccgtttcccacccgtttactgcaagccggtgccgccggctacctcaccaagggcgcgggcctggccgagatggtgcaagccattcgcctggtatttgccggccagcgttacatcagcccgcaaattgcccagcaattggcgatcaagtcgttccagcccaccagcgattcgccatttgatgcgctgtcggagcgggaaatccagatcgccctgatgatcgtcggttgccagaaggtgcagaccatctctgacaagctgtgcctgtcgcccaagaccgtcaatacctaccgttatcgtatcttcgagaagcttgccatcagcagtgatgttgaattgaccctgctcgcagtgcgccacggcatggtggacgccagcgcctgacatgaccacaccgtttgatcccagtgcctttctctccacctgcagtggccgccccggcgtgtaccgcatgttcgacagcgaggcgcgcctgctttacgtgggcaaagccaagaacctgaagaaccgtctggcgagctactttcgcaagaccggccttgcgccgaaaaccgccgccctggtggcgcgtatcgcccaggtcgaaaccaccatcaccgccaatgaaaccgaggcgctgctgcttgagcagacgctgatcaaggaatggcggccgccttacaacatcctgttgcgtgatgataaatcctacccttacgtgtttttatccgacggcaactttccccgcctgagcattcaccgcggggcaaagaagcaaaagggcaagtacttcgggccttaccccagcgccggggcgattcgtgaaagcctgagcctgctgcaaaaaaccttttttgtgcgtcagtgcgaagacagcttctacaagaaccgcacccggccgtgcctgcaataccagatcaagcgctgcaaggcgccctgcgtgggcctggtggaaccttcggagtacgccgaggatgtgcgccattcggtgatgttcctcgaagggcgcagcaacgcactcaccgatgagttgtccggggccatggagcaggccgccagtaccctggatttcgaaaaggccgccgaactgcgcgaccagatctccctgctgcgccgtgtccaggaccagcaaagcatggaaggcggcaccggtgacgttgacgtgatcgccgcgttcgtcaacccgggcggcgcttgtgtgcacctgatcagcgtgcgtggcgggcgagtgttggggagcaagaactttttcccgcagaccggtatcgacgaagacgtggcagaagtcatggctgcgttccttggccactattacgtcagcagccctgagcgcgacctgccgtcggagctgatcgtcaatgtggtgcacgaagactttcccaccttgatcgaagcgatccacgagctgcgcggccgcgagctggacatcagccaccgcgtacgcggcacccgtgcccgctggcagcaactggccgtgaccaacgccgaacaggccctgggcgcgcggctggcgaaccgacagcacgtcgctgcacgcttcgacgccctggccgaggtcctcaatttggacgagccgccccagcgcctggagtgctacgacatcagccactccagcggtgaggccacggtggcctcctgcgtggtattcgggccggaagggccgatcaaggccgactatcggcgctacaacatcgaaggcgttaccgcaggcgatgactacgccgccatgcaccaggcgctcacgcggcgtttcagcaagttgaaggacggggagggcaagttgcccgatatcctgctggtagacggtggcaagggccagttgtccatggcccgtgacgtgctcaacgaactggcggtgcccgacctgatcctgctcggcgtcgccaagggcaccacgcgtaaggccggttttgaaacgttgtacttgaatgatgccgcccatgagttcactttgaagggcgactcacccgcactgcacctgattcaacaaatccgcgacgaagctcaccgtttcgccattaccggccaccgtgcccgccgtggcaaaacccggcgaacctcaaccctggaaggggtggcaggggtcggcccgacgcgccgtcgcgacttgcttaaacattttggtggcttgcaggagctgtcccgtgccagcattgacgagatagccaaagcacccggtatcagtaaaaagctcgctgagctgatttatgcaaacctgcacagcgaatagaatgccttctcacctcgtagccagttgtgccgatgaatatccctaatctgattaccgttctacgcgtcctgcttatcccgattttcattttgttgttctatttgccgtatgaatggagctacatcgcgtccagttcggtatttgccttcgcagccgccaccgactggctcgacggctacctggcacgccgtctggaacagagcacgcccttcggcgcgttcctcgaccccgtggccgacaaactcatggtggccgtcgccctggtgctgctggtgcaggaacacggcaacctgtggctgaccctgccggccgccgtcatcatcggccgcgagatcgtcgtctcggccctgcgcgaatggatggccgaaatcggcgcccgcgcccacgtcgccgtctccaacatgggcaaatggaaaaccgccgcgcaaatgctcgcgctggtcatcctgctggccaacccgtcggacttcacattctgggtactcaccggctacgccttgctgctcatcgccgccggcctgaccctgtggtccatgctgcaatacctgcgcgccgcctggcctcatctgcgaaccaccgttgaaaagaaataaaacttttttgaatcaaggggttgacgggtgctgaggattctatagaatgcgcatcaccaagcgggaatagctcagttggtagagcacgaccttgccaaggtcggggtcgcgagttcgagtctcgtttcccgctccaagcattaatgaaaaagccactctaacgagtggcttttttttgcctgtgatttacgaaatagacgcttaggcgtctttttttgtttgtgcgcaaaaccgtaggggacgcactcaattccgtattgttaccagatccgctcagttcgcctgtcaccaggccaactactgttcgctcaacttcccgacgcgcctcgacgccttgggagaacgtcaattctggcaccgataatcctgagtcacggtggtttccaggccggatcgccgcggtcaagaactatgagatggatgacgtatcaatgctggtgtcagccaaagcgcagacaccgcaaagtgtcatgttgcaatactatcggcgtccaacaccgcgtcagactttcgttcacgaactccacctgctggtcgatgacgtctacgtcatgctccgagctgactccttcaagggtaataccgctcctgttgaagatcgtctgttaaaactctcaaaagagatcttcaaagtcacccctgaaaccgcaggcgcggggtttgcgcttgggccggttgtcattcgcagtcatcacgaccatgagatcgccagtttctattttcgcccccctgcttcagacgtatcgctgaacgtctactacaacgccttatcacctgatgatggagaacgtttgcatgcccgaacccaaaaagacgggaaaatattcctcgcaggcgattatgaacaactgcgtataggcaaaatcacattagctggaatgcaagccgaagaatccttgatcggcttcagtgatgacacacatcgtcaaatacttttcgtcagcgagaattatcgagataacccatccctaagccgtccagctatgagtattcgcctatcggcaggcggaaagaagcgtaccgccatagatcctgataaacccagggatcttgtgcgctggacccttccccagttcgccaacaaaggttacgaactgcctctctggcaacgacccgcgtcaccagaacccgtcaatccctcgctcaccgactacgaagccatggccgtgtgggacgcgatcctcaaatccgtacgcatccgctacggctcggtcgtgcccaagccggacctgtgggccaacattcgcgggcccagtgccgaagaagctgccgaaagcaagcgcatcctcgatgagttcattgccagcttggaaaaacgaaggtcattgccaggggatagcgatcaatgaatagcgcccaccggctttcttatggccgccttcatcctaaagccccccagcttcttttcatgtgcttgacggtcgcgttgctcacgggttgcgccgccttcaaacaacccagtgaacaggagaaacaaaccgtgcacgaatttaccagcaacatgcgcacctgggcgttgggccgaggtttgattgatttgccggccaattggagtggtggcggcgacgtgaagctctactacgggctgggcgccgatcatgcgtctgttgaggtacgcgtgttgggagagaacgtgacgcaggagcggtttgatgccgcattgaatgagcgtgcgcgtcgaatcgcggctgtcagaaatgatgagcagcaggacgcatccatgttggtttcagcaaggcgtgaaacctcgcagaagatatggctgcagtattttgagagcaccgaagtcccagatacattcgtgcacgaattccatctgctggtgggcgacgcctatgtcatgctccgcgctgtctccttcaatggtaataccgctcctgttgaagatcgtctgttaaaactttcaaaagagatcttcaaagttacccccgaaaatgctggcgcgggatttgcgctcgggccggtagtcattcgcagttaccatgatcaggagattgctagctttgagttcagtccgcctgcctctgatatttcgctggaaatttacatcaatgctttatcgcctagtcaaacgaagagcataaagacccggaccgaggaaggcgcacgggttttcctcgcaggtgattacgaaaatctgcgcacgaagaagatcactcttgcgggaatgtcggcggaagaatccctgattggcttcagcgacgatactcatcgtcaactcctcttcggggccgaaaactatcgtgaggatccatcgctaagtcgcccgagcatgaactttcgcatgtcggctggaggtatgaaagccgaaccgatcggccccgacgaaccagaggatttggttcgctggacccttccccaattcgccaacaaaggctacgaactgcctctctggcaacaacccgcgtcaccagaacccgtcaacccctcgctcaccgactacgaagccatggccgtgtgggacgccatcctcaaatcagtacgcatccgctacggctcggtcgtgcccaagccggaccctgagacccacattcgcggccccagtgtcaaggaggctgtcgaaagcaaacgcatcctccatgaattcatcgccagcgttgaaaacgcaagccatgcccccgggcgtggttcagcgggagcaacagggatgcgttcaccgtgtgtaagcaacgaactctaaaaaagcgttaggagcgattcatgaaaacagtctggagttacctcaaacgctggggcctgccggtgctgcgccaattcaaccaggcatggccggtgttggtgctgttgggggtgatgttcttgctggtcgccatctggtggctgggcccgcagtggacgtggcgtgagcgccaaccgttggccgagtgggcgatgcgggtctcggccagtgtggcggtgatcgtggtgccgctgctgatctgggcgtggcgcgtgcgcgagcgttatcagcgtttgcaggttgaacgccagcatgaggctgccgtgcaagccgacccttgcttgccttatatcgaggctcaagagcgggcgttggaccgcagcctgggcagcctgctgaataatatggagcgccgccgttcactgtatcaactgccgtggtacctggtgctcggtgaggagaatgccggcaagaccagtctgatcacccgctccaaccagagcttttcgttgtctcatgtgaccaaggctggggtcagggctcaggaagagcaactggcctacccggtggattggtggatcggggacgaggcggtgttgattgacccaccgggtgaatttctcagccacccggattcaccggctgaaaacgtcgagcagcagggcaagttcaagccggtgttgcccaccggcactcatgcgcggctttggtcgcacctgctcgactggctgacgcgtaaccgcagccgtcgggcattgaacggcgtagtgctggtaattgatatacaggtcttgttggcgcaacgtcccgaacaacgcaaggcccacgctaacctgctgcgcacccggctgtttgagctgacgcggcaattgggcacgcgcttgccggtgtacgtgacgctgagcaagtttgacctgctggaaggcttcgaagagttcttcgccaggttatcgcgcagtggtcgcgaagacctgctgggcttcacgttcagcctggacgcggtggatgattttgatgcctggctggcggagctgacgcgtcagtatcaagcctttgttgattgcctctgcgaacaggttttcaacagcacccgggaggcgcgcacgttggatgagtgtgatcgcttgcaggcgctgatgcatcagatggcgggcttgcgccgcgcgttgtttggtttcctgactgaaatgcttggcagtgatcggttcaccacacccgcgttggtgcgcgggctgtatttttcctcggtgttgcagcagggcactctgagcaatgctttcatcaaagaagcagggcaggcgtatcaactgccgccaccgccaccggaggtcaaaccggccggtggcacgaccatctactttgcccagcaactgttccagcgggtgatctaccccgaagcggggctggcgggcgacaacatcaaggtggcccgcagcaagcgtcggctgttgatcgcggggttcagcgttgcgtccctgggatgtttggtgaccatcggcagctggcagttttacttcaatatcaaccgcgacaaggcggccaacgtattggccaagagccaggagttcagtgagcgggatatcgacgccaaggtcgaccccaccgggcgcaacctgttgctgcccctggaccagatccgtgatgcggtgctggtctatggcgactaccgccaagcctggccgttgctgtcggacatgggcttgtaccagggcagggcgattggccccaccgtggacgaagcctacctgaatctgttgtccaagcgcttcctgccggcgattgccagcggtgtgctcgacgccatcaacgcggcgcccgccggtagcaacaagcaactggcggccttgcgcgtgtaccgtatgctcgaagagcgccccaaccgccgtgcggccatcgtcgaagagtgggttgccaagcaatggcagcgtgcctatcccggtcagggccagctgcaggctgatctgatggggcacctgggctacgcgctgaaatacgccgatgccgacctgccgcactaccgcgaacgcattacccaagtgcagcagcaactgcgccagttgcccatggccgaacgggtctatatgagcctcaaacaggacgctctggaacgtttgcatcgcccgttggacctgcgcaacgagatcggcccggcattcgatatcgtctaccgtccgctgaacaccgatcaagcgggcagcggcctgcaattgccgccgctgctcaccgccaagggcttcaaggactatttcgaaccgggcaccgagggcatcatcgaactggcaatgatcgaccagtgggtactcggcgaacgacaacgtctggactactccgccgaagaccgcaacgtgctgacccagcgtatccgcgccctgtacagcgccgactacgtggacagctggcggcgggcgttgaaccagtttgcagtgaccgacttcgacgaccttagccacggtgtggcggtattggagcaagtcaccggcccggccgcgccgctacgacgcttgctggaaaccctgcgcgacaacagtgtgatctacccgaccgtgcccttggctgaagggcaagcgccgctcaagctggacaaggtgtctgaggggcaacaacaggcggccgggattcggcgcgcattctccagtctttcagaactgatcaacgcacgaggcgaccagccgtcttactacgaagaaaccctgcgctcggtcagcgccgtctatgactacgccaaagccgtgcacgacaatcccgaccccggcaaagccgcccttaaaaccgtgcttaaccgcttctccctgggcggcgccgaccccatcgccaacctgcaacgtgttgccgtgggcctgcccgaaccgctgaaccagcaagtcaaaaagcttgccgaccagacgtctcaggtactggtgattgccgctctgcgcgagcttgagaaacgctgggacagcgaaatctacagcttctaccgcgagcgtctggcgggccgctatccgttcaaggccagtggcgaggatgcgtcgctggatgatttcgaggccttcttcggtccacaaggacgcttgcagcaattccatgatcagtacctgaacgtgttcctcaaagacaacctcgatgcgctttactccgacagccttggcggctacctggtgcgcagcgatgtgctggaacagctgaaaaaaatcgagcgcatccgcgataccttcttcaaccatcgcggccacctcgcggtgcaactcaccatcgaacctctggccctgagcgccacccgcctgagcagcatgctcagcgtcgacggccagcttatcccgtaccaacacggcgccccgcaacgcatcgggctggtctggcccaacagcctgggcaacaccaacggcagccaactgaccctggtgcacagcaccggcaacaccgccagcctgagctatcgcgggccgtggtcgctgttccgcctgctcagccgtgggcacctcaatggccgcaccgacaccagcgtagacctgactttttctgtcgccgatgggttgatgcgttatcggattggggcagagaaggctaataacccgattactcagcgcagttttgaagggtttgtgttgccgaggaccctgcttgaagagcgccagacgaagagagacccaagcaaggttggaagtgtcgccgcaaccgctatcagcgatgagcgtccataagtcagcgatcacacaccacccgctcgacacgcaccgttttcagtgtcatttgtatttcgaatgtaccgggtaaggccttgcagcaattgggagaaacgttgggcatagatatccccctgcgatggaagcagccaagtgctgttgatttccagctgaacgctgggaacgccaagagaggaggcaaatcgtgtgagcgtatgatgcttggcggcagggaagtagtcgtctgagaagttgcgaagcccttccttgcgcaacgctttgcgcaaggaagggacgatatccgtgcggcccagcaacgacgccccttccatggtgccaaagtcgacatcgtaggggcgcgaggtgctgctgccgtggaggtcaatcaatagcttgggcttgtgctgtttgatcagctcggcgacttcggccttgaaggcattgtcgtcgtagtagttggggtcggatgggctgcggtattgggtataaatgaccgttgcgcaggttaaggtattgagcagtttggccagcgccgccgtgcctgcgccgtcggaaaaacgatagctgccttctcgatagggcttcgtggcgtggggcgcggtgatgaggacgggcgtactgcctttgaggacggcataccaagcggtgtcggtgggggcggctgtggcactttgagcctcgatcgctgtttcaatcgttatcgcttcttgtatctgcgacggctcgatgagggcgcgttctgcctgtgccactcccatggtagtgagcaagccgatcgccagcgttacgctgatggcgcgtgggcgcaagttcatgaggagatgctcaggccgggtgtggccgcagttttttggtgatgcgcgcgcaccctgtaatttggttgaactgcacgtaatgggcttgcgccgtccattcctcgaccaggatcaaatacccggccggcggattgatctggcgcagataaccgcacagcaggcgtgtgcgtcgcgcgttcatcggctgctttagtgtcaagatgacgttgtctgcggcacggcattcagtgatctccatgactgagcccctcatcgagtgctggcggcaaacgtgctggcccagtatcagaggctggggattctcgccgcgtggcgttcattctcagatgaggcgttgcaggcgtctactgtcatacttgacagtcctttagtcggttgtgcactgccgtgacccattcctcgacgtaacgggcgttgaatgattcagaggcacagaccgtcgactacgtgcgctcagcttcaagtaacagcgggctgcctcaccttgcgacttaaccccggtgtcttgcccgtaatacgcttgaatgcgcgactgaaagcggcttgggatgtatagcccaagcgctgtgctacctcttcgatcggcagcctttcgagggtcagccactggcttgcgagccgcattcgcagttcggtgacatagcgcagcggcgtcatgccaatcgtcacctggaagcggtccgcgaaggccgagcgtgaggtgttgcattgcgctgccaattgcgcaacggtccagtcgcggcccggttgttgatggagcgctagcagtgcaccggccaagcgtggatcgcgtaaagcggcgaccaggccagaggcattcccgcaggcacactccacccagccgcgaacgatcatggcggccaccacgtcggccaaccgcgcgaggataccggcgaagcccacacgtgcggcgctgacttcgcgctccatggtggtcagaataggcaccagtccagggtagcgctggccgtcggcatcaatcaacatcaggcccggcatcagtttgccgaggccatggatgctgcccagttcaaactccatgcaaccactgaacaaaatggtgctcggcgttgggctggcatcggttgcggtgtgcaccgcgctcacggtgtcaccgagggggacgctgtctaggcggtcgacgtcctgaacgggtgcgtccgcatgggaatacagttgatgggccgcgccgtgggagatgaacacggcgttgccggcagacagcgcgtaggtggtgccgtcctccattcgcaggagcgcattaccgacggccatgaagtggaaccaggcatgcccaggtttttcagcgaagcccaaaccgaaactcggactggtttgtatacgccggtattcgacgccacgcaggcgcatgccgcgcaacagctcgttgatgagatccgaggcaagagcaaactgttctgcagacattgttcaggtgttttagtcaaaaatgagagattttggatcatagatcatccaggttcgcgcgcctagactgcgggtcgccatgatgattgggagatccctgtaatgactgactgtgtgtgtaatgccgtatccaaccgccatcccgacgccttctcggatgcagagcctgcggtccccgcgtggatggccgtcttctcgctggcaatgggagtgttcggattactgaccgcggagtaccttccggccagtttgttaacactgatggcgactgatctgggcgtgtccgaagcactggctggccaggcggtaacggtgacagcagtggtagcgctgttcgccggtttgttggtgccaggcctgacccgcagcatcgaccgacgttgggtgttgttggggttttccacgttgatggttgcctccaatcttttggtcgccgtttcttccagcttcgcggtgctgctgttgatgcgcatcttgctggggattgcccttggcgggttctggagcatggctgcggcggtggcgatgcgcttggtgccaagtgcgctgttgcctcgggctctttcgattattttcagcggtattgccatcgggacggtcgttgcagtaccgctgggcagctatctgggcgggctgtacggctggcgcagtgcgttctttgcagcggcggcggtcggcatggtgaccctggcgtttcagtcattgacgttgccgcgcctcgcgccgcgccggccggcacgtctgcgcacggttttggacgtgttgcagcgcccgggcatcgccatggggatgttcggttgtgtgctggtgcatagcggtcactttgcgatgttcacctacgttcggccattccttgaaggcactaccggcatcggcccgcaagggctgtcgctgatgttgctgggcttcggggtggcgaacttcgtcggcacactgttggccggcaagttgctggagcgtcacccgctggccactctggtgttaatgcctgtgctggtcggggttgcagcactggcgttggtgctgttgccgccctcgttgccggggcaggcggtactgctggcaatctggggcttggcctttggcggtgtgccggtggcgtggtcgaactgggtcgccagcgcggtacctgatcaggcggaaagcgccggggggatggtggtggcctctgtgcagtccgccatcgccacgggcgccgccgctggcggtgcagtgttcagcctcggtggcagcgcgggcgtattcatagcggcggcagcgctgatgctgctggctgcgttgctgattgcgctgcgtgttcgggtcccttctgtgcatggcgttcgcgagtccaagcccgcgttgcacctttgattcggattttcaaaccgcctcgactttctctagagcccccgcaaaggcgggggctcaaggtttgatgttgattgagttagcctgccgaccagactattacccatacctatctatcccatccaacgatgattcactccctaggctggctgcttcgacagctacctttgaagagtgacttcatgcatgaaagcaatccactgttactgccctacgacctgccaccgttctctgccatccgagcagagcacttggtgcccgccattgagcagatcatcactgaaagtcgtaacaccaccgccacgatcattgccagccagaccccattccccacctgggacgacctggtgcaagcagtggaggcgttggaggctcgcctggatggcgttctcaaaatcatcgagctgcttgactcccacccccaagggcctgcatggacgctggcatcacaccgcagttatgagctggccatgcagtacagggttgagttggccgggaacaacgacctgtatcaactgcaccgacaacttgccgacagcccgatcgcgacccttttcaatgaacaacgccacagcgcgttgcgtaaaatattgcgcaagtaccacttggctggccttgatctttctcctgaaaagcagcgacggctgaaagcgttgaacctgcaaatcgataaattcagccacgagttcctgcgtcgtgtgagcgactccagtgacgcatggcgtaagcacattcaagacaaggcgctgctgagcggactacctgacgcagccctggcgcgcatggagttcgcggctcgggacgcaggcctggggggatggttattaaccctttcgaagcaatcctttcaggaggtgatgagctacgccgaccatagagccttgcgccaggaaatgatgctggcttactacagccgtgccgtgggcacggggcctgacgccattgccactgacaatgaagcggttctgaccgtgttgctcgacagtcgtcaccagaaagcacaattgctgggctatgccaacttcgccgagctggcgctggtggaacaaatggcggagacgaccgatgaggtcactgcctgtgtgcatcaacagattgatcaggcacgcacgacatttgcccatgatgcacaacaactgcaacgctatgccgcgcaacggggagtcgatgcgctagaaccgtgggattacgactttttcgcggaaaaaattcgccaggacgtggcgggtgtctcccaggacgcagtgcgcctctacttcccgttggagacagtgctgcaacgcttgtgcacgttcacccaaacgctgttcggcgttgagctgattgaacaagccacggtcgatacctggcacccggatgtgcaggtatttgaactcagggagtacgcgcagccgattggacatttgtttattgacccttatcgccgcgtggcgggcggcgaaattggcgccgccatgggcttgcgcaatcaccgaatgactgccgaggggcgcccacgacggcccatagccgtgctgcgcagccagttgccacgacctacggcggcccagccttgcttgctggatcacctgcaattgagggtcctattgcatgagttcggacactgcctgcagcatctgttgtccgccgccccctaccgggcgatttcgggcatgggccaattaagccacgatacgacggagttcttcggcctagtgctggagcagttctgccttacgccgtcgttcctgatctatctatccgggcatgtgcagacgggagatcccttgcctgacaaaatggcgacgcaaatgagccgatttgctcatacccagaccagtcaggaaaccgccagtattttgctcacgggcctcgttgacttcgagttgcaccgcacctatggcgacgggcgcacaccgcatgaagtattcaccgacgccaatgttgaagtcgggcatttgcagtggcctgatggcgctcgtccgatcaacagtttcgaacaaccgatgggtagctatggcgccaaactgtattcctacacgtggtccggcgttctggcccgccaggcgtttgagcggtttgagcgtgatggcctgttcaacccgcagaccgggaaagccttccgggacgcgttcatcactgagggcgataccggtactctgttgagcgcacttgcgcttttccggggggacggcgcgggatgtgtcgggcattccaccggggtatgaagcgctggtgcatatgtagcccctgagctgaaacgtggaacgccagagtgatcttcagtagccagtccggtatggagagcattcaatgagcaccgacaccccaccgtattttttcagcgaaacccaaactgatcgcacgcaactgagcgagcgccaacgcacccgtaactttaccctcaaggaccttgactggttcgattccgtttacctggccaccgatgctttgcgccaggcacaaaaagcaccgatgcacgtccagaccctgcagctgaacgtgctcggtcaaccggctattgaacttgcaggtgcattcgtcatgagccccgccccggaaggtggggttattctctatacgccagcgcgtggtctggaaaagctggaaagccatgaagcactcaagacgcaactgggttcgtggctcaaagacgcgtcgcagcgccaagcgttgcttgattacctttccatctcccagcaactaaccctaacccccactgcgaccctgacgattaccgcacacaccgtggccggcgctgtcttcgaagcacaacatacgaccctctccaacaacctgctcgacaatgcccgtttgatgcgcgaggagctgctcaaactgcccagtttcacttcgctgctggatgaatacatttgcactgaattgacgcagtcttttacggggggcgatcagcaccacatccaagtgcagagttatgtcatcgatgcatcccgaaaatcaggcaactctgatacgccaacgccccgacatacgaccacccgctccttgagcgaaaccgtgctcaggtatttcgtcgccaatgactggcctgccggggagacccggcgctattacaacccccagcagcctactcaggaagctgatgttcagttgcgttgggacgtatcagtccaaggattggcccggggcttgaaagcctatatgaagcaacagcccaagacattttgggcgctgccggccgccgcagggctctcacgactacaactttttacccatgctatggccaatgcctttttcacggtggcgttggagcaacaacagcaaactacgattacggttgagcagcgtctgcaactacaggccttgccgctcaaggctgcgcagcccgcgacaacgcttgctcctgcgatcgatgttgaaaaggcactgctgagtgagcctgaacaggccccggccgagctggcaggcacactcatcatcagcagtaacaaaagcgacgatggctcgccctggctgctctataccccccaccagggcctgcaatcgtttaccgagttgggagcactcaaaacccacctgcttgatggtctcaacccgcggcagcatgcggatgcctggagatcacatctatccaggccggaacgctatgacgaagtagacctgctggcttgcgacgtcaccaaagcccccatcaccggggttattttccaacgcatcatggagggcattgtcgaaaaacaaggtcgcaatcttgaatacgcccttgatcagtatcgccttagccagggcacgatggacctcgacgccctggttgatcatgtgctggatgtgcgtggcatgattgaccccacattactgaccttcgaccccatggggcgttggagtacccagttggcagagacctggacggcgacggtgactgaacccaggattccaccaacgctggctgcaatgcgcacaactgtgcatttactcgaaaatgtcagcgccgaaatcgaacaacacctatcgtttcacccctcgctggagcgttccgttatcacctatctcaataccaaactgcacgccatcaagcagcaacacttgcaggccgcgtgcctctctgtacgccaatacagcaacccttcgagtgacactgacaaacctcaactgctctcatcgagcagtatggtcgactattttctggcgcgtttatgtggcgaagcgggcccacttatcgatccgcttaacacgcacgtctattcaactgctcctggcaaacccgccaccaaggtctcaggcatggacgccactaccttcaatacgttgatcaacagtgcagtcggtgggtttaaacagtacctgtgtagaacccacagcgtgtcccccaacatgcaacccttgctgagaaaggcaatggagatgggcttgacaggggaagtgcaagtcaggctctggaacaatgctttattgcctctcgactacgaagtgcttttgaccgtgttaggtatttacgccagagacttacgcactggcgtcaatgggttccgccctgatgcgttttctttgcaggtcgtaccgactgggcagagtaccccgctggtactcaataactgtttcgtgctgaccgagcgcggtgggcttgaccctcaatattgcggtcgcacgctgctatggacacccgagttgggcctggaaagtttccactcattgagtcacttcaaagcagagctggaccgacgcctggcaatcccggacgaacgacaggctttcctggcgaacctggcgcaaccggattgggattcacatccgcgctatgcgctcagttcccttgaactgatcgaggataacctcgtcgagcacttgcaacgaacctatgctcaacaaaaagaccgtgagctgacgcacatcctgtccatgaaactgtcggtcgaacagttgcgtaagctgtggcaggttcaagccacacaaaacctggcgcccaccaacgtgcagcgtgccatggacatggtccgggccatgatcctgcaacagggtttgcaatggttcggcaacgccagtgctgtcgatcaacagctctatgtcgaattgttggagcagtatcgaaacaatgtcaccgacaatcaggattacctgcacgggatcgactccctggctcagttcacgcgcaagaaactccgcactttactgaaggcgcttgatgttcaggacagcgtcgcacctgatgacgtcgaagtcgggctaccggggcagggcagtacacctgcccgcaatcagtcgctgctggactatgccttgagtcatcaatcgtattggaaggatgaggtgcccctcgtcgccagcaccgggacaacgccgctgcctgacaccctggatgggcagacgctgaaaacgcggacacaggcgctgaacatcaacgcggcttatcaaacgtacatccaatccgcattgggctctgccagctcggactttgcgcaacgctctacgcgattcgccaagcaactgccgtggcaactgatgcaatacgcgcatggcatgaggttgcaaggccagctttcagaggcggccttcgggctcattcaacagatcatggacatgcccgatgcgatcgctcgtgcgacagtggtggatgccaacgcgatgatccgccctttgcaactgctggttgatggagggaggaagacgatcaagatccctggggtttacctgatcggtcccacctcgggtgacgaggggcctctagtcctttatgccccctatagcccaggctacacccttaaggaatacacggtggaggccgcactgcgtgccgagttgacagcctctggtgccttacaacgttgggttcggctggtggtcccggccgttgaccacgcggcactgaccagcgcactggagcaaccccaagccaacaccactctccaactggcatccaaccccatcaccgcgcccttgttcaaccagttgtataccgacaatgtcgagctgctgacaacgctgctgggctgccaaaaaaccgctgatgcaggcaccgcctgggagacggccaaggccgtgttctctgagggagtgaagcaggccatcgtgttttttgccggaaaactggcttaccccttggtggtctggcagagcttcaaactgttcaaagcatcttccgaagagctgcaaagccaccaatggcatgaggcactggggcatttcattggaggggttgccttgctggtcggtttgcgcgattccatgcctcccgtatcagagggcggcatgcccccggcacccgagccgatcccgccgccttccacacctgcggcctctgtggtgtcctggcccgcgctggacattaccgctgcttcccgcacccggctccagcgtttcgaagtccttgaaccgagcttggccaacctgatcaaagacacctcactcaacctttaccgatcgacctccaaccattactacgcggcggtggcagggaaagtgttccaagtcatcaagcatggccagggttggcgcatcatcggtgatggcgaagtcggtcctgaggtacagctcaaccctcgacaacagtggatgctcagtagcgccggcccagtgatgacggggcgacgcacacttgcacgattacttaatcgcttctactccgagccatttgcgcgctccagtatgaatgtattggccagcgggatgcgcgagatacgagcgctttacgctcgggaatcctgggttatcaccgatgcacttgccttggcgacgttttatgcaaagaacgcccaggaaaatttgcgcctgatcgcacaaaccccccttgctgcacctgagctcgttaaacagatcaaagcgtttttcggcttgcagacgctcgaggtcgaacaccttgaaaaaattcaggagatcgtcgatacggtctgcactgcgttgatggagccctcactgacctcctcggactcaacgcgatttgtcattggccgttcgcggttgccggctcttcagggcgggcacacgttgatggcctttacgattgtccctgacccccttcaactggtgtacttgaccgaggtgtttttcaatccaggtctgaaatacggtcatttgttgataaaaccgttctatgtcagcgtccatgcccgtgcgactaccctcattcacgaagtcactcatcatgtatgtgagacgttggacttggcttacgtgcattccacccatccctttgatgacctgattgacccacaaacccctgagggccgtaacactaaaataaccctggaaaaccgccatctttcaaggctgtcgctcaataccccgacccatgaattgttccaggttgtcgatattgcaaccggcctcaaaacagaccctacacagggcacggcgacacagcatgtgctcgacaggctgctcaccgttaccggcacccaaaccctcgccgatgcccggcgagttttccgcaccgatccgcttaaacgcatcctgacggtacttaacaacgccgactccgtcgcctacctgattgcacagctgggacgtcgaaaagagagacctgttggcctgaccagcgatttgccctgatttgcaatgctcatggctacaggctcgcagtgcagcccgttgcaaaaggacccggtgcgagacgctgccgccaacgacggtgcagtgttgaaggtgatctatgccgatgtgacgccgcccctggatcacaagctgtttctggggttgctggcgagcgtgcggtagccctgcaacgccggttcacggggcagccgctgggtgcccggcttgctgagcgctattcaatttttagataaccgttgacagtcccctgcgtcccgccctcaatcgtccccggctgtgcgagttgatggccatctgatagtcatctgaaaagggaccaaggatatgggcgttttcgattacaagagcatgaagggcgagcacgccaaggcgctgctgaacaatgccttggttttatccgagtacgcgtatgactccactggcaaacccctggcgacgggtggctgggcgcctattggggcgcaggcactgggcgtgacgcagaaggtcgacacgcaaggcaccttttggggcgagaccgccttggccccatcagccaacgttgagattctcgggcagtacgatgggggcggcaggctgattgccatgggcatcgcctttcgcggcacgtcctttggcttgacctgggatggcgcgggtgatgtggccagcgacctggcggccgcagcactgcctggatacgccgccaattacgccaagttcgccttcagcgccctgctcgaaaacgtcgctcgttacgccgcgagccagggcttgagcggcaaggacatcctggtcaccggccatagcctcggcgcactgggcgccaacagcgtggcgactttgagccacgatcactggggcggtttttatcaggacgccaactacgtaacctttgcctcacccactcaacgttcgggtgacgcccaggtgttgaatatcggctacgagaacgacccggtgttcaaagccattgatggcaaaggcatcaatacctcggcactcttctggggtaacgaccggggctgggattcggccgccaacaacctcgtcatctttacggataattacgcgtcgttctcggcacatttacccaatacgctgaattggggcgttgccaaggctcactccttgagcggttatatcgaaggcttggggcgtatcgcgtcctccgagttctacgacctgacgagcaaggattcgaccatcgtggtctccagcctcacagaggctgcgcgtgaaaccacctgggtagaagacctgaaccgctacgctgaaaaacacaccggtaacacctttatcctcggcaccgagggcaacgacctgctcaagggcggagccggcaatgacttcctggaaggcggcggcggcaatgatcgttttcgcgatgatggcggctacaacatcctgctgggcgggcagggcgataacgtcttcgaactgcacaaaccactggccagcttcggctttgccaacgatggcgatggcacgctctatatcaacgacgcctatggcggcatcagtatgacccgggatattggtgcgctggtgagccaagagaagtcctacatattgtggaattcagtcccctggagcacctacgacgtcacctataacgtaaccggccaaggcctgctggccggcacagccttgacgccctacacggcctctgccaacggcgatgcgcaggacaatatcctcaccgctcatgctgcaggggaatggttattcggtttgggcggtgacgatcatttgatcggtggccagggcaataatgtgttcgtcggtggggagggcaatgacctgatggtgtcgggtggtggcagcaatactttcctgttcaacggcctctttggcaatgaccggatcgaggggtaccagggcagcgataaactggtgttcatggggattcctgacctgggccagcaatacgatttccgctcccatgtctcgatgttcgaggacaacgcgctgctgtccttcggggacaattctgtgacgttggttggcgtgaacatgactcaactcaatggtgcaggcatttctatttcctgaatatccacccaatgggctgttgaacctgtggcgagggagcttgctcccgtgacggcccctcagccgacacatacctccctgacgccccaggaaccaaaatgtgggagctggcttgcctgcgatggcggctgtccggccgccacgggtgcaagcccccgcgccacaggtgcagcgaatattcaccgcgggtttgtcatcgagctcaaagccgctacctcatagcctccggttacttgagcgtaacgtcgagcatcggcgggatgtaaccgtagtcatactcagcgaccacaaacgtttgctgccctttgatcttgatgcccaccgtcggtgcttcggtgccgccgatacggatctgcgtgccggtgtcgtcggtcggtacgctgtcgatgaaggaggtcaccaggccgttgggcatgacgcagtgcgagtaggtctggaacggttgggaggacgggttgcccagtaccagaccagagccgttcaacggcacatacggaccgaacagcgaatcggcgacgaatccgtacacgccgtccgggccggtcacgccgtcggcgtaggtgaaggtgtggctgatggtgaacaggtagtacttgccgtcctggaacacgaagtgcgggcgttcggtctggtcgttgacgcccaccgcggtcagcagaggtggcagcatttcccagtcgtcgccgtcttcgtcgcgggccacggcgataccgacgcaggcagtctggaagcgcgagttaccgacgtcttcataacctggcggcacgtcgccgatttcggctttaccgaccttgtgcgagccgcgttcgccggccacgttgccttcgaacagcatgtacagcttgccgtctttcgggtcgcggaacggccatggatcgcgaaagccccagaacgcattttgcgcttcggtctggtacatcttgccgtccgcctcgaacagcggcttgaccttctcaaagcccaccaggctgacgccatgctcggtggtcaccacgcggccacgcaccttgacgatggtcgcgccgggcgtgacggcagtgtagtacaggtctacttcgccttgctcgttcaacaggatcggcgtgccggcccattcgcgcacggtgggcgaaaccccttcagccatcactcggccgccgagcttccagtctttgccggtgcgggagaaccagtagtacatctttgcccggccatggcgatcgttccagtcgcggatgacgtcgtagttgccattctgatcgaggtattgcgggtcgttcgggtggcgatccgcggtgagggtgaagatcaccgaccagccatcgacggaggtgatgttgccgtcgatatcacgcagcggcatggtgtcccagataaacacctcgtcactcaataccgggaagttcgcgctgaccagcggctgggtggtggtggggtcgtccgcatgcactttaagcgcatcggcgcgggtccacaggctgggttgatggggtgttttgccaaatttcgaaggggtgcttttcatagtaagtctcgtccatgaagggaatcaaattactgtattcatatacagtgatttgactttagaagactcgattcccgtggtcaaggcaaaaaatgcatttgtgcatgatttggctttttataggagctgagacgtttcagcttgtcttgtttgaagaggttcgatcattaagtagatcggcgaagttgcccgcatgatggcggcaaaccaagcgccaggcagagaacctaaaaataatgaaccctgcccgcacccgcgcaccaaaagttacataacctggaggtgcatcatgcaaaccacttacttctggataggcctggcagttatcctcgtactgctcgatgcgtggatcatcaacagcatctggcgcagcgataacgcctcggcaagcaaggcaggctggagtgcggtagtcgtggtactgccgttcctgggcgccgcgatatgggcgattgccggcccacggggtgtcaccaagggaccgtcttctcccgagcacagcaagggttgagtccgggcccggctatgaacaacccagaccctgacgacttacacagccgcaattatccggtgcaggaaaacatggccttgcagcgcaaggtctggcgctttgagcgggtggggtggtatgcgctgctggtgttgatcgggctgagcctggcgggcctgttttccagcgggccactgagcacccgtgaggtgcgcagtgccgatgggcagttgcgcgtggagtaccaacgctttttacgcaatggcgcttccgatgggctggtgattcatgtgctaggtaaggcccaagagcccttggagattgagttgagcggtgagctgctgcgcggtttcaatatcgagatgctgcagcctcagccgctcaaggccagggcggccggggagggtgtgagcgtctggatgctgagtgacagcgccggccaggccgtgttgtacctgaccttgcgcagcgacacggtgggcagcgtggatacccaggtgtcgcgaccagaaacgggcgcgtccgtgcgcttttctcagttcatctacccttgaacgcctgccccacgcctaggggcgggagcggcacagtttttcgatcaaggtgatgagcgaatcatggccaacgggtttgctgacatgcgcattaaagcccgattcagtcgcctttttctggtcattgccagcgccatagcccgttaaggcgatggcgggagcctgtcgaaggtggcctactttacgcagcttctgcatcagctcatggccattcattttcggcatgccgatgtccgaaataatcacgtcgtaatgggcatcccgggctgtttcaagcgcgctcaaagggtcgctgaaggcgctcacttgggcgccttccatttccagcagcatgttcagcacctcaaggacttcggctgaatcatcgaccagtagaaccttgaggccattgaggcgctgatcttcgttctgggtagcgccgctatcgagcagatgatcctgctgtacgcacagaggcagccagatcgagaaggtgcaaccgaagcccaaccctcgcgactgcacactcaccgaaccaccatgggcctccaccaactgccgtaccagcgacaagccaatgcccaggccttcacgctgatgggtctgatgctgattttccgcttgcccgaacaggtcgaagattttctccaggctgtctgcggccaggcctgcgccgctgtcgatgacgtccagttgcgcgcgcccgtccgttcggctgaccaccaactgcacctggccgtcctcgggggtgaatttcagggcgttgttgaccaggttccagatcacttgctcgatgcgcgtcgggtctacgtcaacgatcaacgggcccggcaccgaaggtgtctgaaggctgacctggcgacgatgaccgtcggcaagcaccacgctatgaatgtccttgagggtgcgaatcaggtcgatcggttgctttttcagcttcagcttgcccgtgcgaacccgggcgacgtccagcaggtcgtcaatgatccgcgcctggctggacaccgcttcgcagatggtattgaccgccttgatggccgggcccgcaaccttggtggcgggcaagcgccgcaacagttcggcgttcagctggatcaggttcaacggatgcttgagttcgtgggacatcaccgcgaagaactcatccttgaggtggctgttggtctgggtttccttcaagcgctgattctgttcatcttgcgtgcgcttgtggccggtaaggtcgcgggcaatcttgacgtagccgcgcaaactgttgctcttgagctgggtgacctcgccactgcaatagaagcggctgccgtccttgcgcacgtgccagcgttcatcttcgccacgcccatgttcgcgggcggtgcgcagttcgctctccggcacgccagcggagcggtcttccagggagaaaatcaggtcgtaataagcgcccagcacctcgtccttggtgtagccgaagatcagttcggcaccggtgttccagtcggtgatggcgccatgatcatcgaggatgatgatggcaaagtcatgggtgctctcggcgaccaggcgcatgcgctcctcgcccaggcgcagttcctcttcggcctggcgccgcttggtgatatcaatgaaggtcagcacggtgccgtcaatgtgatcttcgctggagcggtacggcagtaaccgcgcaatgtaccagcggtcgtcgttgctgctgatttcccgctcgatcatgctcagcgactcaaacacggtggtggcgtcttcggtcatttgcgggtaatcgaggcggtgggtgatgtccagcagcgaacgcccggtgtccacgggcagcatgctaaaaatatccgtggcccgcggtgtgaaccagcgaatgcgcatgttgcggtcgacgaagaccgtggcaatgtcggtggacgcgatcaggttggtcaggtaatcgttgaccttgtccgtctcttccaccttggtcttgagctcgaaattgacggtcagcaattcttcgttgatcgactgcaactcttccttgctggtttccagctcctcggtggccgagcgcagttcttcgttgaccgcctgcatttcttcgttggaggccttgagttcctcgctggagacttccgcctgttcgatggtgtcctgcaggtgcaacttggtgcgttgcagctcgcgctccaggttgctcatgatcgcgttttcggcctggctgacggcgtcgatgtcgggcagcaacgggtcgacggcggtttcctggaagatcaccagcacgtagtcgttttcggtcgcttcatcgcggtaggggcgggcgctgatgtccaccaggaaggggccttgctcgcgttggatgcggatcttgcgcgaagacaccgggttattcgattgctggacctggaacagcgtggtgcgaatatccaggcgcaaatcggggtgcaccagcgtcagcaggttgtgcgtcacctcgccggccacgtagcgcaggaagcgacctgcgccttcgctcatgtgcaggatatcggcctgcatattcacgataacgctgggcggcgcggctttttccagggcgcgcagatggatgtccgcgaacgagaccttgttgggcgccttggtttcaatcgccagtgtcgtggtgctcgggcgcagataaccgcctcgcggcatggtcggggcgcggcgcacggcggacgagccggcacgcaccctgaaaatgcggttgcgcttgtccaccggtacgaacaggtccaggcagccgtcggccgactccgaagagccgaggaacaggtagccaccggggcgcaacgcgaagtggaacatttgcaggatgtcgcgctgcacttcgcggtccaggtagatcaacaggttgcggcacacgatcaggtcgatctgcgagaacggtgggtcggccagcaggctgtgtttggcgaacagcaccttctcgcgaatttccttgcgcacccggtagtgctgattcttctccttggcaaagtactggcgcaaccgttgaggcggtacgtcggtgatgatcgcttcggggtacacaccattgcggccatgggtaatggcccgctcatcaatatcggtggcaaacacctgcatctttgcgccgctggcatccagcgccagttgttcggccaccagcatcgccaggctgtaggcctcctcaccagtggagcaacccgccgaccagatacgcacctcctcacggtgcggcacgctgtcttccagtgacttcaccaggttgggaatcacgtctcgctcaagggcttcgaaggcctcgcggtcgcggaagaagttggtcacgccaatcagcatgtcgcccagcaacgccttggtttcgtccgggttggcctggaggaagttgtaataggtggccaggtcgggttgagccgtgacctgcaagcgccgctcgatacgccgtaacaccgtggcgcgtttgtaatgcttgaagtcatgcccggtactggcgcgcagctggatcaaaatatccagcaacagctgctcggccacggcggcatcgcgttcggagctgggtggggtggtcttgatctccgggtcgttggcggtgggcaggacaatcgactgggcattgcgccacagttccagcagcttctgcggcatttccaccacaggcagcaccaggtcgaccatctgcgtttcgatggccgccagcggcatgccatcgtactcggcgtcttccggggcttgcaccagggtgatgccgccttgctctttgatccgtgacagccccaccgcgccgtctgagccggtaccggacaggatcaggcaaaacgcgcgttctttatgggtgtctgccaggtcgcgaaaaaacaggtcgatggcaatgtgcgtcccgtcttcacgtacggcaggcgagaccgcgaggtagccatcgttcatcttcaacagctgcgccggtgagatgacgtacacgtggttcttttcgatgggcgtggcgtcattgacctgcgacaccggcatgcgggtcgtttgctggatgatcttgtctgccacgctttgatggtcgggcgaaagatgcaggatcaccacgaaggccatgccgcagtctttgggcatgtgctcaaaaagcgctttcacggcttgcaacccgcccgctgacgcaccgatacccaccaccgggaaactcaggttactgggggtcagatctttgcgttgcggtacgttgggggaccgcgggggggcagacttcataaataccaaccttggttaacggcgcacaggaagacggggtgtagagggaagaacttgaacaacgagggcgagggctgaaccgacagtgaaatatagctgaaaacctgctgccaacaaaaaatgccttgaggccacccggtcattcgacggaccactacgccccggttgagacgcgcaaccgtcggaaggtttaatcaaactgacgagtggccaccgtgggtgcacggttatccgattttctgaaaatccgtctgaacttcgcttgctggcaaaccctcgcaaagagaaacccacccaggagaagctctgatgaacagctatccaaaaccaccgttccaaccccagcaacagtccgtacccggtgagcagcgcaagatggacccgatgcccgattgcggtgagcagtcgtaccaaggctcgggccggctcgcgaataaaatcgccttggtcaccggagccgacagcggcatcgggcgggcggtggccattgccttcgcacgtgaaggcgcggacgtggcagtgtcgtacctggatgaacatgaagacgccaaggagaccgcacgctgggtcgaggcggcgggtcgtcaatgcctgttactgcccggcgacctgggcgatgcggcgcagtgcacggccatcgtcaacgacaccgtggagaagttcggccgcatcgatgtgctggtcaacaacgcagcgttccagatgacctatcagtctctggaagacatccccgatgaggactgggtgaaaacctttaacgtcaacatcaccgcgatgttccgcatctgcaaggccgcgctgcctcacatggccgagggcagttcgatcatcaataccagctcggtcaactccgacatgcccaaccccagcctgttgccctatgcggccaccaaaggcgcgattgccaacttcaccgccggcctggcgcagatgctcggcgagcgcgggattcgcgtcaacagcgtggcacccgggcccatctggacaccgttgatcgtctcgacaatgacggaggatatggtgaaaaactttggtggcaacaccccactgggacgtcccggccagccggtggaagtggcgccgatctatgtgctgctggcgtcggatgagggtagttacatctccggcgaacgctacggtgtgacgggtggcaagccgatactttgatcagtgattgaggagggcggtatgagcgaagcctcgaagcaccacgaaccgaatcattccgagcgcaaggtgcgcccgccggcagcgaagcgaaacgataaatcgcaggctccggcaggcggacaacaggcaaaggagcaaggcggtgttgctcccggcgggccttcgacagaccctgagtcaggggcgtgaacgcgaggggatatacactcggcctgacatcctgatgggttgtcaggccgctatcgcaggcaagccagctcccacaggctgacgttatttgcgcttggaacgatgaattcgcatccactcccgataggccactgtacgctgcgcatccgcacgtttcttcgcctcggtaaagcgcgcccacgtctgcgcatcgccgctgtaggactcaatgatctcgtacgccaacgcatccaatcgatccgcttcaaaaaacatctcggcgtttcgcgcgacctcatcgtcccgcctgtttgtcgttgtgtaaccaagagtctggctgttcatcctctgaggccctccgcccattgaatctgtgccgcgccactccagcgcacctgggtaatgccgtatttctccgccatcggtttggacacacgcttgaacgtgtgttgtccaaatttggggatgaccgccacaccagcgtcacaactggcccaatgccaagcctcggcattgtccatgcgcggcgcgcgcacgatgaaagacttgggctcgccgtgcagctggtactcgatagtgaataggtcgttgtgtttcatgaggcctccttgatactcatgaactacagatatttgacgtcaaaaaaaattcaaataagttgtccgacaattcgatgactgggcgcagggcgtggatgaggcttaatcatctaccgtaaaggtgacccatccaggcccatcggccgggcgttccagctcggcgatcaccccgctgacagaggagccgtcaggcaaattgacggtaataaagttgggattgccgggccaatccaatggcgtgtcaaagtccaagcgcgcgatggtcggtttcccgctgctggccatttggatgctttttgattcgttaaggcgttcatctgagggtgttccaagatggcgcgaggcagtgatgacactggcagtaccttggtaatcgtaagacatgctgggttacctcataaaggggagacaacgaagatcaaatgtgggagcgggcttgctcgcgaaagcggtggatcagtcacatcaatgtttaatggaccgacgccttcgcgagcaagcccgcacacagaggagctgcgcttgactggctggcattcgggatttgccgtgttcatttgtgacgagctgaatatttgcgcgcaacgacaacgccacccactagcagcgctgcgcctattgcaacaatgccatagggcgtacggcgggtttgccgccagccgccttcgacacgacgttcgccgcttgccggggtgtagaggttgcccgcagaggtcgcggcgcgctggctgcgctccaggccgaggcgggtgagccaaccggataaccgggcaaagccaggcagcaaaaaatgcgcgacgcgggccacggtggcagcgctgcctaccgtggtgctgtctctgggttgcagcgcacaggccaccatcgcttgcgcgactttatgcgggtcatagaccggtggcggtggcgtcaactcgtggccggtaaaattgccgccatcgcgaaagcccggtgtgtccatcacggcgggatagatgtcgcacacatgaatatccgggtagtcagtcagctcgccacgcagtgcctcagtcaggccgcgcaggccgtatttactggcggagtaggcgacggcatagggctgggctacccaactgcccagcgacaaggtgttgatcagaatgccgcggtgctgggctttgaaatagggccacactacgtgggcgccgcgcaggtacccgagcaggtcggtttgcagcacctgttcgtgggcttccaggggcgtgtcctcgaaactgccgaccgcacctactccggcgttgttgatccagatatcgatgcggccattgccgaaggccgccgcctgttcggcaagggcgcgcatctggtcgccctgggtcacatcggttttaacggcgatggcctcggcgccacgcgcagcgcattcctcgacgacctcttccaaggctttttcatctcgggccgccaacaccaagcgggtactttgctcggcaaaggcgtgagcagccgcgcggccaatgccactggaggcgccggtgatcaccacggttttgccgtgcagtttccccttggcctgcatgacgccaggcgaatcctcgggcacgtggacgggcaccgggtgcagttgtaggcgggcgccgtcagtcagtatcagggtcaagttttcgagggtgccagcgacgcggtcgggaaacaccggttcgcctgtggcatcgagctcatcgtagataaacgtctggccctcaagccatccgactgccgtcatcagttcagggcccaggtaatattttccgtccaagaaaaacccgctgaagttcggggtgcgctccaggttttccacggcgtatcgctcgccaggcctcattccggttgcggtatcaatcatcatgacatcctcctttggctggtcttgggtagagaagggcccgcaaatgatcgttcaatccaaatgactgaatggcggcgtcagtgccggtgggccttttgggttgggtcggcgatctggataaccgtgccctggcgccacgcgtctgcaccgggtgcgatgggcggcgcggggatatcggcgcgagcctttttcttttcggtactgtcgatgcccaggcgtttatctcgctcggcgaccatacgcgggtcggcctggccgtcagcggtgaaccccatcatcaactgcgggacacccaggggcaggcgtttatccagatcggtatgccaggtgtgccaggtcttgccgtaggtgtgcaccagcttctccatcagtgcatgctccgccacctcggggattcccggagccaccagttgccctgacttcacttcatgcacatggctatgccacagcgccttctcaggcgcgggcagcgtgttgaattgcgcctcgctgatgatgtactccacgcccatcaacttggcatccttgcggttgccgtcgtagatcacgcactggatgacctcctcgttgaggattgcacagtagtgatgggcttccatttgtacatcgggatggccgttgtagaagtgaaagccgtccaggtaggcgttcagtgcgtcaatcggtgggcgagattgcagcagggcggcgccggcttccagcgttcgggtcgagggcttcgtgggttttccgggggcctcgacattcgagggtgagttgttgccagcgcaggcgctgagcagggccagcatcgctactgcggctaagggttgggtggggttgtcagtcatggtcggctgcctcctgttgccggtgtgttcacgctcgaggatcaaagccaggtttaatcctgttctcgttggaaagacgagcgtgcggagcgttcaaaatgctttgagttgaacactcacgcatgtggcttgccggcgatgacggcctcccagccggcccctatctatctgatgccccgcgatcaaactgtgggagcgggcttgctcgcgaaggcggcctggcaggcgacaaagttggattgtgtgcatatccattgctgcggtaacggccacttagggttccgccctgacggcggctcactttcgaaaagcgcgaaagtaagcaaagcgctcttgccccaccactcggcacctcgcttaggctcggtgtgcccgaacgcaggcttgaatccgtgggccgccgccacgcgccatccatggcgcggggcggctaacccggcgtcctgccgggttacccacgaattcaagcctgcgttcggccagcgtggtttaacggggcgcctgagatcaaaagcagagcaagatcaagagcggctcgcttcgcatcgtggttacctttgaacgctacagcgttgtgccaaggcacgcaggcccacgcagacctacgtaggcctcagatcgggccgctagaagaaccggaagaatccgcctcccgctcgctgtcatcaaccgcgttaggctgccccaacttgctgtattgctcgcgcaatttctgcagctctcgcgacccgagcttatccaggctcaacgccgcattgtgggcttctttggtggcacgaatcagctcgtccagtttcagatgaagaatatcgttgtcgcggttctgggtattctggatcaggaacaccatcaggaaggtgatgatggtggtggaggtgttgatgattaactgccaggtgtcgttgtattgaaaataaggcccggtgagcgcccaaacagcaatcaagctgacggctgtcagaaaggtttttgagctgcccgcctggttggagagtttttggcagaatttcgcgaacttcatggtgctgtctcctgggggatgttcctctgtagaccccagcagattttcgaaattcttttttacaaatcgattttttttgacaaaaatcaatcagcaacacccctctgcacaggagcgttcagcatgtcggtcgctgcttctatcgttgaatacctcaagcaccatcaattggtcatcacgacggcggagtcgtgtaccgcaggcaagatcatcaccttgctttcccaggtcgacggcagcggttcatggatcgaaagcgggtacgtggtgtattcgccagaggcgaaacagcggctgttaaacgtacgcccttacaccatcgaaacgttcaacctcaccagttgtgaggtcgcccaggaaatggcccaaggcgcgctgcgcgacagccccgccgatgtggcggtcgccaccactggcctgctggggccggatgggatggacggcattcctccaggcactgtctgttttgcttgggcttatcgaaacggcggggcactgagtgtgttcagtcgcaaggaacactttatgggctctcgtgagcaggtgcagttggccgcgtctcttcatgcattgaaatggctgccgcattttcaccagcgggcgttggtgggtgaacgcgcctaatgctgccaagtgcgcgcgtttacggctgcggttcgatgtccagcagcaagtcgccattggttaaggacttagcctcctgcaccacaccacgataggcctgaccgttccattcaaagctaatccagtgggccttcagcaattgcgcgggccatggcggcgcaagccgcaactgcacaccgggcgcagcgcgcacaagctgcgccatgcactcgctggcgagcgtgttcacaccgaacagcgtgtcttgcaggtattcaatgttgaccggttgcagcgttgcgtcagtagcgtctggcatatctgttaccccaccgatgacagccagaaagactgcctggcgatgaccatttcttcacgtatttcccgcacaagccggttgatcccggaaacaccgtggtagtgggcgcggttgatgttggcgatggtgaattggtccataccgtgcgccgttacagtgactgaaaggctgccgtccgggttgagcgcgcacttgaccgcgcacttgggaaggcgagcggaaagggccgtttcgatttcggctttcgttaacgtatccatgagttcaccgcataaaggactcagcgcgttaaggctagctcagaatcagttggcgtaaatactggcaaggtaatggctgcttggaggccggtgttttaccttgtcccgatgagctcgcattgctttagctttcgataatgccgtacagatttctggccctttctaggagcgttcctaaatacgccggctgaagctctgccgataattcgcacatccccacttatgtgtgctctgccatgtccttcctacctattcgtgttctggtcatcgaagaacacccgttcaagcggcttgttgccacccaggtgttccgagaggtcgggtgtgaagaggtggccgccgttgccgatgtcgcggcggccgttgagttgctcgagcgtaccgggcctgtcgatatcgccttgtgcaacttgaaggacgagggcgcacacggcttgagggccatcgaagtgctcggccgtggccacttggctaaagcgctcattatgttcagcgcccatggcacggacctgcacgatgcaattgatcgcatggcaggcctgttgggcatcagtgtattgggttatgtggacttcccggtgccagcaagcgccattgcgcctatgctcagccgctacctggagaggattggggcgccgacaaagcaggcgcgccgaagcagccggtctgggttcttgagcaaggcctgcgtggctgggggtttttcaaggcatgagttcaaggcgtttttccagcccaagttcaatttgagcacggggcaggtgcgcggttttgaagtgctggcgcgttggcaacatccacaatacggcctgttgtatccggcagattttttgccgttgctcgctcaagttggcgcgttggatgaactgttcttcgcgctgttgcaacaaggccttgagttcttgcagcagttggcagagcaggagcagttcctatcgctggcgtttaacctggagtccgaccagctcggtcatggcttattactgccgcgtctttgcgactcactccaatcccacgccattgctgcgtgtcgtctgacgtttgaaatcactgaatgcggcctgctggaagtttctcccgccgtgctcgacaccctgatacgactgcgcatgatgggtgccggcctgtcgattgatgacttcggcaccggctattcctcgctggagcgcctgtgccagttgccgtttaccgaaatcaaactggacgccgcatttacccgcgatcttcaaagcagtgcgcgcaaccgtgccgtggtcagtagcacattggcactgggcgaggcactgggcatgcgagtggtggtggagggcgtcgagaacgaaaaccagcgcctgggattactgaagctgggatgcaacgaggcccagggctatctctgtgctcgtcccatgaacgctgcgcgcgcgttggcctggctggcgacccagttgaactcgcgcagcaatatttgatgtcaatcaggagggcttttatgtccaatccacgtttgcggatcgcgttggtagatagcgatgccacccggcgaatgagtattgaaaaagaccttggccatttgggataccaccgcgttgtgcctgtcgattccctcaaggtgttgattacgttattggataacgcaagggatgtatttgatctgttggtgatcaatgaagaaaccgtgcacgcggcgggcgcacagtttaagcaaatgcttgaggagtacgcgtgtgtcagacactcattgatttatcagggcgtgaccctgcaagcgtttcccgataatccagtcacggcgcaacgctgcggctttattgcctccggtgttccggaccgatcgattctggcgcgcgtcatggatcgggtggatgtgcaaataaaacagcgctcgggcagaccgttgctggaatccaattaatcctgatgtgagctattgcacgcttttcgcgggacccgccaccgcctcagttttatgcttttagtcccattcctatttgcttctttttaggcactgataagctttttcgctgaaacaatctcgggaaattctttgtcatgatcttaaatgccgccgtgcctaacgagttcagcgccctgcgcgtgatcacgttggcaaccgaccctgcgtgtgtcttgcgcctcgcctctgcgttgggtggcatgggggtcacgccgctggccacggtcgcctcgctggaggcgctgcaggcgtggttaagcgcgcaccgcgtggacatcatcgtgtgcgaaatccgctccgagtgtggcgatggcctgatgttgccaagtgtgctcaaagcactgcatgacgcgggtacgttaatgcagtttccgagtattttctggaccggcgaaaccaccctgaatgtgcaggaaaatttgatcgaagcaacagttacaccggcgtgcgaagcgcccgctaagcagttgtgggtcaagcacatgggcggcgtagccatcagcgcactggaatcccattcgcgcctggcgcagtcggcgggaatcagcgtgcagatcttgcgtgacggtggcccgctggagctgggcgatgccttgcgcacggtgctgctgaccctcgctcaaccggaccccaagctgcaggccatgacgtttgagtcgctggctgaggatgaagtcatcaacgccctgaccaccggcgagggattgcgctttgtctttcagccacagttcgagttgctgagccggcgcatcgtcggcgctgaggcgttggtgcgctggaagcacccgcgctttggtgaaattccgcctgcggtgttgatgccgctggtcaaccgtctcggcctggacctgttgctgttcagcctggtggagatgtggactctgcgcgtgatgctagcgttaaagcgcgaaaacattacgatccctatcgcggtgaatgcgtcggccaagaccctgtgcacccccaattttgccgagcgcctggccttgcgcatgcgccaggcagatctgccgagccgcttgctgaaagtcgaactgaccgaagatgtgcaggagccggatgagctgcatctttcggcgtcattgacgactattcgcgccaagggttttcaggtttcgctggatgacttcggcagcggcgcagccactttcaagctgttggcgaacctgtcgtttgatgaaatgaaaatcgacggctcgtttgtgcgcggtgtcgagcaacacgcctcgtcacgcaaggtgatcgccggcatcgtcaactgggcacgtctgctcaacctgagtctggtggcggaggggatcgaggacgagtccacgatccccctgctgcaccgcctgggttgccgggtagggcagggctatgcgctggcgcgcccgatggaaatagacgccttcttgaactttgtgattgagcgggaaaagaacggctgaggctgtaaagtttggcgggcaagtaagtattggaacttgatgtgtgtaggtcagctcttggtttttaggagttttcttatattaagtttttcgcagatctattaagttttataccgttgttattgtgaagaattggcgcattttttaactgcgatggtgagcctgtgcgcgttaagttatagggagtgagcgtgtggcgtgtgatgttcagttgcacggatgtaattgatgaaatggatgagtctgagaggaccttaacttattcagagtgaggcagcgtcgttgtccatttttttgcacgctatacagagtgttccgtcatttatgaaacgcctacaaattgctttgctggatgatcatgcaatcgtgcggcatggtttggtcaatcggttggtacaggaacctgattttgaagtggtgggggtctacgctcgcagtcgtgagttgatggccggcctgctgacacacccggccgaggtgttgttgctcgattttgtgctcggccctcatgagctggatggcatcctgctgatccgtgccctgcgggtaaagtacccgggctgccgaatcctggtgttttccacacaccatgacgcggccacggtgattcttgccctgcgcgtcggtgctcgtgggtttatcggcaagggtgaagacatgagccaattgatcagcgcagtgcggctggtggcttcgggcgctgtctacctgagtgccgacatggcctatcgggtggccgaagccacggcggtcaactatgacggtgaggagcaatcacgcgatgacgcgatgcgttttgtcagcctgtctgcgcgggagcaagaggtgatccgctgttacctggccggcatgaccatcaccgaaattgctgaaaaattcagccgcagtatcaagaccatcagttcgcaaaaggcctcggcttttcgcaagttgggcgtgatgtccaacaacgagctgtttcggatcaagcacatcatcgagagtgtttaacgctaaacgcaggccacgccgacgcgcgcaaaaacagcggtaggcgggcgtgccctttggcggttgttgcatatactccttgaagtgccgtaatagctgtccctgttgtttgaccgcgccacctaagcggggccaagtgggttcgaatacgatgaaacctgtacgcattgctctattggacgaccacgctgttgttcggcatgggctcgccaacaccttggcggccgaggccaactttgacgtggttggcatttatgaaaaaagccgcgacttgctcgccggcctggtcagcgctccggctgacctgctgctgctggatttctccctgagccccgacgagatggatggcgtatcgctgatccgcgccttgcgggtcaagtttcccagttgccagatcctggtgttgtccgcccatcatgacccggctaccgtggccctggccatgcgggtcggtgcccgtggctttgttggcaagggcgaggacatgacgcaagtggtcaaggccattcgcaaggtagtctccggcgcggtgtacctgagcaccgacatgacgtatcgcctggcggaaaccgtcaccagcgagacgcgcaaagaccccagcgaagcctcggatgccctggtccaggccgagctgaccagccgtgagcaggaggtgatccgctgctatctggcgggcatgaccgtgagtgaaatcgcagaaaaattcaatcgcagcatcaagaccatcagcacccagaaaacctcagcgtttcgcaaattgggggtcacctcgaacaatgaactgttcaagctcaataaaatcatcggctcaccatgaggcgatggcgaccgggtgccctcttattcatgttgctgatgctggatgccgcgcttgcctgtgcggcgccggttgagctgacggagcaggagcggctgtggatagcgcagcatccggtccttcgagtgggggtgatggaaaacctggtccccttcgagtacatgagtcgtggcgtgctgcaggggcggccggtgcagtacctgcaatatgtgcgcgatgccacggggcttgaattcacctatgtgccggtcaagacccgggctgcacgtgagcgcatgctgttggatggccaggtagacctgctgtcttcgcactttcgctttcgtgacgagccgcctatcgaggatcttaccgcgctggtctacgacactaccgtgccgatcatcgtgacccgtgtcgacgacgccgatatttttgaccttgaccagctacaagataaaaccgtcgtgatccccgatgtggagtattacgagcagttgctcagaaaaagggcaccccgagccactctgatcaaaagcccccaggccttggccatgctgaacaccctccgggacggtggtgccgatgcagtcgtggcctccgaagccttcttgatgccctatttgtatcgacagtttcagggcgtgctggaaatttctggcgtggtgggcagtagcatgttggatgtgaacatggcggtgcgcaccgataacgccatgctggcctcgatcattggcaaagccctaggctcgatcagcccctcacagcagaatgcgatgtacgagcattggtaccgggacctggaggtagatgcgccgaccctgtgggacatcgccagccattacttgcaccttttgattctgggcatgttggcgttgattggcttgtgtgtgctggtctatcgcggttaccgccagcagcggcaggccgagcggaacgagcaggaaaaaaccatgttcctggcggtgatgggtcacgaaatacgctcgccaatgaacgccgtgctggcggccatggagctgctgtggcacacccgactcaatgaccagcagcgccacttcgcgcacttggccaacagcggcgccaatatgctggtgcgcttgctcgatgatgtgctgcaccggccggattcaggggccaaggcgttacgcctgacacttgaggcgacggatgtcatcgcgctggtgcatggcgtagtgggcttgcatcgcctgcgtgcgggggaaaaacacttgagtctgaatgtgagcgtgcagacacccctgccgtcgttgtggcttgaccgttcgcggctgacgcaggtgtttcataacctgttgtccaacgccatcaagttcaccgataccggcgctgttgacatcaccctgcgcctggaagacttgctggacggtaagcatcagttgcaggttgaagtccgcgacaccggcatcggtatgggcgaagcggtgcaggcctctttgttccggccttatgcccaggcgagtcagtcctacaagcgtgcgggaggcagcggcctggggctgatgatatgtcggcaattggtcgatttgatgcaaggctcgctgaccctgcgcagcgagccgggagtggggacgtgtatcaacctgtacttgcccgcaacccttgcccctgaggccgctgaaccgacgcgagccccggccccaatgcctttgcatgtcaccgatggtttgcagctgctggtggtggaagacaccctggccaaccaggaagtgctgcgggcgcaaatcagcgggtttggttgtgtgccagtgattgccgccgatgcggcccaggcccgcgtgcggttcgctgagagcgcttacgcgttggtattgatggactgcgacctgccggatcaggacggctacagcctggtctgcgaactgcgggcgctcgaacagcaatgggggcgagcgcgctgcccgatcattgccatttccgccttgaccggcgagcagcaccttcaacgctgcctggcggcgggcatggatggggcgttgagcaagcccatacgtctggggcagttgagtgacgtgatcgagcagtggtgcggcgtcacgttggcggcaccgcgtgccagcttgatggcccctacacttgatcaggccgctatcaaccgtgagatggcggctgacctggggagcctgctcagggcgatggcgctctgtgatcgcccttcggccatccatgttgcccatcggttacacggcgcggcactgatcatcgaatggccggccctggcccaggcggccgcgcacatggagaacctgttgcgggcagaggagggctggggcaacccggtttacgtgcacacgcttcaggcgttggttcagcactggcgtgccgcgagcgaggagaccccgctggacatgctggccatggtcgcgccgccgccgatgacgcaaccatgagggttgcacggttgcgcctgctgctggggtggttgctgctggcaagcgcgggcctggccgatgcgcaggccgacccgccgtcgatgaccttgacccagcaagagcgtgactggatcgccgccaaccccgtgctgcgtgtcggtgtgttcgacaacctgctgcccttcgagtacatcagcgacggccagttgcgtggattatcggccaagtacctggggctgattgcggcgcgtaccggcctgcatttccagtcggtggtcaccggcaatcgtagcgcccgcaaggacatgctgatcagcggcgaggtggatatcttgccgacccggcgccgcgatgacgatccggtcaaggacctgggcatgcgctatacgacgccctacaacaccagttccaccatcctcgtcagccgctttggccaacagccattcgtggacctggaacaacttgccggcaaacgcctggtgatgttggggcgcgaggggtatcaggcgtttttgcagcagaaggtccccggcataacggtgatctccggccagaacgccgtcgacatcatggcgatggtcaaggacggtcgggcggatgccgccatcgcctctgaatggttactgatcccctatctttcccggcagtatcagggggtgttgcaagtatccggggtggtgccgcaattgcacaccggcgtgagcatggcggtgcgtgacagcgacgagatcctgttgtcgatcctggagaaagtgctggggtccatcagcaacgatgagcgcaaagcgatctatgacgcctggttcgatgacatgaacctggacattccgacgatcaaggacatcgccgagcatttccagggtgagttgtggctgttgctgtcggtggtgctgctgttgatcgcgttcgcctggcaaagccgtcgtcagcgccgccaggccgtgcagagcgagcgggaaaaggcgatgtttttggcggtggtcagccatgaagtgcgttcgccgatgaacgcggtgctggcggctatcgagttgttggagcacacaccgctggacgaacagcagcgccacttcactcaattggccaacagcggcgccaataccttgctgcggctggtggatgacgtgctggacatttccaggatggaggccgggcaactgagcctgaccctggagcctgtggacctctgggccttagtccagcaggtggtggaggagtatcgcgccggcgccgaagaaaaaggcctgttgctgacattgagtggtgaacgccccagcggccccttgatgctggagggcatgcgcttgagtcaggtgctgcgcaacctgatctccaacgcggtcaagttcaccgaggtaggcggggtagaggtgcagctcaaggtggttgaatggccagaggttcctgtgccgcacgtgctgatccgcatcatcgacagcggcattggcttgtcacagcaggcgcaggccagcctgtttcggccctatgcacgggccaagcattcttacaaacgtaccggtggtagcgggcttggcctggtgatttgccgtcgcctcgtgaggctgatgtcgggtgagctgaccctcaacagcacccaaggcgtgggtactgaggttgaagtcaaactgtccgtcgagtgggccaagaccctggatataccccaggctgaagcggcgccggcccaagtggagggtaacggtgcacacgtgttggtggtgcaggcgcctgtgaccggccaacagacactgcctgcacacctgcaagcgctgggttgtagggtgttgctggcggttgatggcgcccaagggttgacgctattcaatgtgcgacgggtcgatatggtattgatcgattgcgacttgccaaacagtgaaatcgagccgctggcgggcgcctttcgtgagttggagcaggtgttgcagcgtgcccattgtccgcttgtagctgtcgcgggcttcagcgataacgagcacctagagcgttgttttgatgcggggctcgacggggtgctggtcaagccggttacaccagccaagttgcagcagatgatcgagctttggtgtgacatgccgcaaggtccgctgccggcaatgcccaaggaagagtcagaggaggagtcgcatatcctgcgcacggccttcaacgacttgatcgaggcactggccttgcgcgagcgaagccaagcgttgcaggcagttcagcgtctgcacggggcggcgctggggctggagcgggacgacctggtgagcactgtcgaaagcctggaacggctattgcgcgatgagcgtgactggccagcgcagcagatagccgagcgtctcagcgtgctgcttggtcaaaggcctgcgccagcatagcctcgttgctgtacccgctcgttctcacaggtggggcttgccttaatgccgttcagttaagcgtatatcgccctctgtaggagcgagcttgctcgcgaaaaacgtcaacgataatgtgtgcttcctgaatgaacgcnnnnnnnnnnnnnnnnnnnnnnnnnnnnnnnnnnnnnnnnttcctgaatgaacgcggcgcctgtgagtttttcgcgagcaagctcgctcctacaaaatgccttaactgaacggcattagagcttgcctgcgatagcgatgggtatctatacaactctgtagcgctcaatggtaaccacgatgcgaagcgagccgttcaggcggcccccaaatcactggcggattacgggcacaccgagcctaagcgaggtgccgagtggtggggcaagagcgttttgcttgcttttgcgctgttcaaaagggagccgccgtcagggcggaaccctaggtggccgttaccgcaggaacggatatgtacccaatccaactgtgttgactgtcaggccgccttcgcaggcaagccagctcccacatttggactgcggcgcgccaggtagataagcgtcggatgtcaggccgccacgggtccagcctaacctcgaagttgtgtagatgcttaggctgcgataacggtgggtcagtcaacatctgatgatcaggataacgatgactcattatataagctggatttaaatataccgttcaggcgcgcttttaggaccactcctatagacgctttgtctgttggcttattaaagccagcccactatggtgggtgactttgtttgttgattttaatcgcctgtttataaggtgatttgcccgggttatttgtttttcagagcactcctattttgaaaattaagtgcgctgcttacacttcatttcgcaacaacgcagaagtatttcccgtccagggaacttcacaacttaatcaagcctatcgcgttctcggagttactcatgaattacaaagctcgcgccctcgctgtactggtcgctgccaccgtctcttctgctgccatggcttcggacggcaaaattgatttcaacggtgagctgaaagccgaaacctgccaagtggccgtcaatggtgcagcagcttccggcgcgaccaccgtcaccttgccaaccatctccaccgcttccttggcttccgccgggcaagtagctggccagaccggtttcaacatcgaactgagcaagtgctctgctgcgatcaaaaccgcggcggcgttctttgagtcgggcggtggcgtggatccggccagcggtaatgtgaagaacatcagcggttcagccaccaaggtccaactgcagttggtggatgccaccaatggcaacgcgatcaaggccggcaacacgtctcaggttacctccaccagccgcgtaactgttgacccaactgccctgaccgctgtgctgccgtacgccgttcagtactacgcccagtcggctaccacgccgggcaccgttgtgggctccgtgacttactccatcaattatcagtaagtcgcaggctttggacacacgccctgctcggtattgaagggcgtgcatccagacggtaaagggattgctctatgtcgtgcacacgtgcattcaaaccactgctgctgatcggcctggccacactgatgtgttcccatgcattcgctgcagtggtgattaccggtacgcgcctggtctatccggcggaccagaaagaaatcaccgtaaaactgaacaataacggcacgttgcccgcactggtccaatcatggatcgacaccggcagcgtcgaatcgacacccaccagctccaaggcgccgttcctattgtcgcccccggtggcgcgcattgacccgaccaagggccaaagcttgcgagtgctctttaccggcgcgcctttggcgcaggacaaagagtcggtgttctggctcaacgttctcgaaatcccgcccaaacccgaggcgggtgcagacctcaacacgctgcaaatggctttccgttcgcgcatcaagctgttctatcgcccggtcggcttgcctggaaatcccaatgaggcggttgagcaggtgcagtggcaattggttacggcacgcgatggccaaggcctggcgctgaaggcgtacaacccgtcggcgttccacgtctcgctgatcgagttggacctagtggcgggtaaccaacgctatcgcagtgaggacggcatggtcggccctggggaaacccggcagttcgcgctgcccacgctcaaggccaggccgtcgagccaggcacaagtggagttcagcgccatcaacgattacggcgcgttggtcccgacccgcaacacgctgcagccctgatccattcctgacgtttttacccgcgagtcatctatgtcgaccttttcttgctccaggctttttctgcgggcgcggcctcgcttcgccttgaatccgctcactgccctgatcctcaaggcattggccattgctccaggcgtgtggagcatgcaaggcgcgttggcgcaagaagtgcagttcaatgacgccttcctgcccgaagactcgcgcaatcttgacctgagtgcctaccaggccggcaacccggtgatgcccggtcaataccgagccgacatcatcctcaacgggcaactgaacaaccggcaggatattcgcattgacgcccaggccgacggcagcaagccggtggtgtgtatgaaccgtggcttgcttgagcgccagggtgtgcaaatggccagccttacgcccgaggccagcacgctgctcgacagtcaggcgtgcccggcagtgtggcaggtaatccctggcgctaccgcgaacttctccccagagaaccaggcgctggacctgagcattccccaggtggcgctcaagcgtaatgcgcggggttacgtcagcccgcagttgtgggaccgtggcgtgacggccgccatgctcagctacaacttcaacgccaatcgtaaccgcacccgcagtggcaactccgattcggcgttcatgggcctcaacgcgggcctgaatctgggggactggcgcctgcgccacaacgcgtccatgagctggcagtcacgtttgggcagccggtatcaggctctggacacatacgctcagcgtgatatcaccgcgttgaaaagccaactgacggtgggtgagtccaacaccaccggcgagatcttcgacaccttgtcctaccgtggcgtgcaattgtccactgacgaccgcatgctgcctgattcgatgcgcgggtatgcgccggtcatccggggtattgcccgcaccaatgcgcgggtaaccattcgccaaaccggcaatatcttgctggaaaccaccgtggcgcccggcgcgtttgtgatcgatgacctgtactccaccggctatggtggcgacctcagcgtgagcgtggccgaagccgacggcactgagcagaactttatcgtgccctacgcctcggtcagccagttgctacgccccggcacctcgcggttcagcctcaccgcgggtgaaacccgcaacaacttcgtcgacgatcaggcgcgcctgctgcaagggactgtgcagtacggcttgaacaataccttcaccggttttgccggcctgcaatcgagcgatgactacacggcggtgctcaccggcctggcgttcggcacacccatcggtgcgatggccgtggacatcacgcacgcccagaccgacctggccggcggcgctgccaagggccagagcatgcgggtgtcgtacagcaagaatgtgctcagtaccggcagtaacttctcgctggcggcctatcggttttccactcaggactacctggatttcagcaacgccatccaactgctggatgccgagaaaaatggctgggattcgagcatgttcggtcgcccgcgcagtcgtttttcggtgaccgccgaccagaaccttggggcttgggggcaagtctctatcagcggttacgcgcaaaactactggaatcagccgggcagtgatgtgcagtaccagttcagctacagcaagcagttcaaccgcgtcagcttcagtgtgaatgccaaccgcagccgcatggggctgggcgacatggagaacagctttttgctgaccatgagcatgcccctggatttcggcgcgtcgggtaacactccgcaaataaccgcgcaggtgggccgcgatacccaaggcaattacagtgagcaggccggtatcagcggcaccgccggccaagaccgtcaatatggctatagcgccaatttcggccatgacggcgccaaccacagcaagagcgccgcgcttaacggtcagtacacgggtgggcgagccatgctcagtgcggcactggggcgtggcgatggctataccagcgcctcgatgggcgccagcggcaccgtggtggcccacgccgagggtgtgaccatgacgccgtaccgcggcgaaaccatggcggtggtcagtgcgccgggtgccgcgggcgccaaggtttcgggataccccggcctcacgctcgacagtcgcggcaatgccgtggtgccgtacctacggccttatgagctgaacgaggtggccatcgacccgattggcagttcgctggatgtcgaactcaacgagaccagccaacaagtcgccccacgcgccggtgccgtggtgcatcttaaatacaccactaatcagggccgtgcggtgctgctcaatgtgcgcctggacgatggcagcagcttgccatttggcgcaggcgtgaccgacggcgaaggcgcctcggtggggatggtcgggcagggcggtctgctctatgcccggatcaagccagaaacccgccagttgttgatcaactggggcagcaagacccatcaacagtgtgccctgatgattcctcccggccccggcgagggccagcaattgcagcaggtggacgctatttgcgccgccggcaaacaggtcgcgggcagcacgccgcccaacaacatgcaaaaggtaccgttatgaacatgggcgctttgatcaaacccagcctagcgctggcggcactttgggcgatggccgatacggcaatggcagtgacctgtacatataacaacggtatccaggccgcagtgggcaacatgccattgcaggtctcggcgattaccgtcggacgtgatgtgccggtgggcgccgaagtctatcgacagcgcttcagcatggccttgggccaggcacccgagctggactgccggtttgctccgtttcaacagtggaccgagttgacggtcgaggcgacttctggcttagccaattggtccagcggcccctatgccaacaaggtctacagaacccgaattccagggctgggggtggttatcaatagtctcggcggcgtgctgcccaggcaaaccaacaaatcctggactgcctgcacatcgggctctcgctgcctgattccgtttgatggaccttcgaacttcgaattgatactgatcaaactaggggaagtaacgccaggtgtattggcgggcagctcattgccggtcgtgagcctgtttggcaacttcggcgatgccaggatgcagggtttcaggatgggcatctccggcagtatccagattgtctcgcgcacatgcagtacgccggatgtttcagtgccgatggggacgcacttgaccaataagttcaccgggcttaacagcgccacagggtggacagatttttccatcaacttgaatgattgcccggcgttccatggcacctattccaccaccggacctggctggctttcgcaaagtggtaattcacccaccggcgttggctccggcggaaccctagcgggtaacaccctgcaatttcgcatcgactcctcgcgcccggcgatcaatgccagtacgggcgtgctgagcattgatcccacaggcacaggtaattcgcctgccgcaagcggagtcggcatccaagtagcgacactagacagtaccccggtacccctggggatgaatcgggccagcggtattaacccactgtccttcgagtccagctacaacatccgcttgcgtgcccgttatctgcaaaccgccaaccgagtcacgccaggcccggccaatgcgtcggcgacgtttacgattatttatcagtgatgaatatgtcacttatgttctgtgcgtttggtttgaaggggcagccaggctgcccctcccaccgttactcaagaacccgacttccgaccgccgccatggctgtgctgcccacctttacggccggcttccgaggctttttcacggtcgttggcgaagttgccgcccgacgcctggccgccttttttaccggcttcggaggctttttcgcgatcattggcaaagttgcccgggtttttattacctgtagtcatgatagttctccaatcgctaagttagcgtttcgttagttggccgtttcgcaacggacacttattccgatattggctgtttgggaaatgttttaccgatttttctaaccggcgacgaacggtgatttcgctgaaaaagttatacaggaacttggttgatgcgccgcttcgtataacttttattgccggtcagcgcttcggtattaataagatcgaaactgccggcttagtttagggtcctgccattcgtctttttcgtcgcactccaaaaaaaggcgtcgttccaacgaggttcctaacctgtgaacgggagcatttcagccatgaagcacaacccatccaacccacagtaccggccgcttgagcaaccagacgcacccaatgaagacggttgcgtgattggcactgccgggcgcgacgaagaccccaacgcgaccaccgattgggaccatcccgacagcgccgcgacacccgctgacgccagcatcaaacccgccagcggtacgcccggcatcgacgccgtgcccgagtcggaaaaccacggcgccgattgagagaactgcgctacaagtgccgtttcgcttggcctgcagcgcattaccgctggtcgtgaggcgtcggtttattttgaaattttccacgcgcaggccacttcccatgcaaggtaggcgcgcattccagcagggcgcctttttccgtaagcctgaggagatttgttcatgtttctacataacaagcgacttcaatacaccgtgcgtgtcgccgagcccaacccgggcctggctaaccttttgctcgaacagtttggcggcgctcaaggtgagttggccgccgcgtcccgttacttcacccaagccttggcggaagacgacccggggcgcaaagatttgctgatggacatcgccaccgaagaactcagccatctggagatcgtcggctccatcatcgtcatgctcaacaagggcgccaaggggcggatggccgaaggcgtggaagaggagggcgagttgtatcgtgccctcaatggcgccggcaatgactcgcacatcaccagcctgctgtacggggcgggctcgccgctgaccaactctgccggtgtgccgtggactgccgcctacattgacaccatcggtgaacccaccgcagacatgcgttcgaacatcgccgccgaagcccgggccaaaatcgtctatgagcggctgatgaacgtcaccgatgacccgggagtaaaagatgcgctggggtttttgatgacgcgggaaatcgctcaccagatatccttcgaaaaagcgctgcatgccattcaaccgaatttcccccaaggcaagttgccgggcaagccggagttcacccaggtgtacttcaacatgtcccaaggtgcggaaaacctgcgcgggccctggaaccagggtgatggttgggagttcgtggaaaatccacaaccggcggtcgatggcggtgacggcaccgccagcgtgcagttggacgccgacgaggaagcggtgctgagcgcgatgaagatccgcacgctctcggaccccaccagcgaccccaccaccggcgctgacctgggcagggggctgcagccaaaacctgagccatgacccaggctgtacggtcgcgcggcgcccaatcacgggcgccgcgccctttgatggcactgcgcagcattttcacggtccatggaacacataccacgtatctggaggtgaaccttggcgacaaagaagaagcctgtggtcgagggtatggaattggcgatgctgtctgccagccgcaaagacctgttctttgcggccatgcaagccagccacagcgcaatgatcgtgaccgaccccgccgagccggataacccgatcatctttgccaaccaggcgttcctgaccctgacaggctttgaactggacgaagtgattggccgcaattgccggttcctgcaggggccccaaaccgacaaaaacgcgctgcaccaggtgcaacgcgcagttgagcggcaccatgaggcctgtgtcgaggtgctcaattaccgcaaggacggctcgaccttctggaacgagctgttcatttcgccgttgttcaacgaacgtgggcaactggtgtattttttcgcctcgcagctggacgtgagccggcgccacgacgctgagcagcgcgtgcgtcgcgcacaagacctggaagcgctggggcaactgaccggtggcatcgctcatgacttcaataacctgctgcaagtgatgatgggttatctcgacttgatccagcagagcgccaagcgccccggcagcgatccgcagcgcatcgtcaacagtgccagccgtgccagggcggcggcggaaaaagcgcaaacgctgacccagcagttgctggcgttttcgcgcaagcaacggctcgacagccgggtgatcaacttgaacagcttgctcggccgcccggacttcatggcccgtgcgctgcggggcgtcgagttgcatgtagaacttgccgaagatctgtggaactgccgcatcgaccctgtccaggcggagctggcagtgcagcacttgttatccaatgcccaggatgctttgcgcgggcgtgctgacccagcggtaaccgtccagacctgcaacgtccaggtaccgggcgatgtcggtgccgagcgggatgggttgaccgagggctgttacgtgagcatttcggtctcggataacggcaacggcatcgacgcaggtattcaggacaaagtcatgcagccgttcttcaccaccaaggaagaaggccagggctcgggcctggggttgtcgatggtgtacggcttcgtcaagcaatcgggcggcacagcgcggattcattcagacccgggcatcggtacgacgatacgcttgtactttccggccgatgacagccagctgtgggtcgagcaggcacctgaggcgacctcaccccaaggtaacgagcgaatcctgattgtagaggaccggcccgaggtggccgagttggcgcaggtgattctctctgactacggttaccacacggccatcgcccacaatgccgccgaggccttgggcatgctcaagcaggcgacgtatgacctggtgttcagtgacttgatcatgcccggcgcaatgaatggcgcggcactggcgcgggaggtgtcgcgcttgtacccgcacatcaggatcttgctgaccaccggctatgcgaaagacgcgttggcccgcgcggacatagaggtgcatgagttcgagttgattcccaagccgtatcagcctgctgacttgccccgcaaaatccgtgcggtgcttgatgccagacagccgacgacgatatgaccttctgtaggagcgagcttgctcgcgaaaaactcacaggcgccgcgtttatgcaggcaacccgcgttatcgttgacgtttttcgcgagcaagcgcgctcctacagggggagggcgctgcccgcagagctacctcagtactgccaacgccaggttaagcgccagcaccagcactatcgaaaacccgaatatcctgcgcgcccaggcggtcgggtcagtcagtcgtgtgctgttggccgccaggttgagccaataccccccaagcccgagcatcaccacaaaatacaacgccgccatctgcgccaccgcgcccagcatcagagcgcttgcgaggaaggccagcatgtacgtcagtatctgccggtgggcttgggccaggctcaacagcggcaggcctgcggcgcggaaatcctcgcggcgcatcacggtgatcgcgtgtgaatgcggcatctgccaacaacagaacaccacgatcagcagcaacgccgtgaggtcaaaccgcccggtgaccgcgcaatagccgatcaccggcggcatcgccccagagaggctgccaatcaaggtggcccagtgggaacgccgcttgagccagtaggtgtagacccccgcatagatcactagaccgaccgtcgccagcatgcacgccagcgcattgctgccggcccacaacaagccaaaaccgcaggcgcccaggacgatcgcataggctgcggcagtggacactctgatggtgcgcagtgccaatggccgatgacaggtgcgcaccatgcgccggtcgatgtcgcggtcaatgcagttgttgatgacacaaccgcacccgatcaccagggccgtgccgagcagggtggcaagcccgtgcgtcaccgaggccacatgcccgctggcggcgagcaggtaaccgcccagcaccgaggccaggttgccgacaataatgcccggcttggtgagctcgatagcggtattgaacaacccccgccagtgtttcagtgcgccagcatgttgtgatgaatactgtccatgatccataacgaaagccccaccaacagaacaatgatgaccgccgagaaaatcagcgcaatcaggttccagcgttgttcttcggccgtgtccaggtgcaggaagaacttgaggtggaccacgatttgtatcgcgcccaacgccaccaccagccaggcggtgaaggtgcgcggcagtgacgggaacatcaccaggccgaacgggatcagggtgagcaggaccgacaccaggaacccgaccaggtaggagcggctgctgccatggctcgtaccggcactgctgtgaagcgagctttgcttgtacatgtcacaccacccccaacagatagaccacggtaaagacgcagatccataccacgtccaaaaagtgccagaacaggctcaggcaactgagccgggtggcgttggtgctggtcaggccgcgttgcttgacctggaccatcagcaccgccatccagatcagcccagtcaacacgtgcgcgccgtgggtgccgacgagggtgaagaaggccgtcaggaaggcactgcggtccggcccgtagccttctgcgatcaagtggtggaattcgttgatctccatggcgatgaagcccgcgcccaacacgaacgtgagccccagccagcgcagcacatcgcgttgcttgccgtggttcatggcgagcatggcgtagccgtaggtgatactgctcaacagcagcagcatggtttcggcgagcacatagggcagttcgaaaatatccatgctcgacggcccgcccgccacgctgtcgcgcaatacggcgtagccggcgaacaaggtcgcaaacaggatgcagtcggtcatcaggtagatccagaacccgaacaggctcagggaaccggcgtcttcatgcccttgttcgtgggtatgggcgatgtctttttccataacgatattggacatgggtcaagcctctgccaggtctttgagacgtgccgtttcgatgcgcgcgacttcctgcgcgggcacgaagtaatcggtgtcttcgtcgtagctgcgcaccacgaacgccaccaccgaggccaccaggccgaacgccgccatccaccagatgtgccacaccaacgcaaagctgcagaccagcgcaaacaggctgatcaccaggcccgacgcggtattgcgcggcatgtggatgctgcgatagtcggtgtggctgagggtgctgacgccgcgctccttcatgccccagtacgcgtccaggtcattgaccttgggctgctcggcgaagttgtacagcggcggcggggacgcggtggcccattccagggtgcgcccgtcccacgggtcgccggtgaggtcgcggtattgatgacggttgcggatgctgacaaacaattgcaaggcttgcgccgccacgccgcagaggatgattgccacccccaccaactccagcagcagccagggccgccattcggggttgtcgaaatgattgaggcggcgcgtcatgcccatgaaacccagcacgtaggagggcatgaacgcgaaataaaagcccaccagccagcaccagaaggcgatgcggcccagcttgtcgttcaagcggaaaccgaacgccttggggaaccaatacgtcaggccggccatatagccgaacaccgcgccgccgatgatcacgttgtgaaagtgcgcgatcaggaacaggctgttgtgcagcaggaaatcggccccgggcaccgccagcagcaccccggtcatgccgccgatgctgaaggtcacgataaagcccagggtccacagcatgggcgtttcgaagcgcacgcggccgcggtacatggtgaacaaccaggtgaagattttcaccccggtcggcaccgcgatgatcatggtcatgatgccgaagaacgcattgacgttgccccctgcgcccatggtgaaaaagtgatgcagccacacgatgaacgacaacacggtgatcgcgatggtcgcccacaccagcgacacgtagccgaacaaccgcttgctgctgaaggtggctgcgatttcggaaaacaccccgaacgccggcaggatcaagatgtacacctccggatgcccccaggcccagatgaggttcacgtacatcatcgggttgccgccggcctcgttggtgaagaaatgcatgcccaggtaacggtccagggtcagcatcaacagggtggcggtgaggatcgggaatgccgccaggatcagcaccgacgtgcacagcgcattccaggtgaacaccggcatcttgaacagcgtcatgccttcggtgcgcatcttcaggatggtgacgaagaaattcacccccgtgagcagcgtgccgatgccggatatctgcaatgaccagatgtagtaatccacgccgacgccggggctgtagcccagctcggataacggcggatacgcgacccagccggtgcgcgcgaactcaccgacccccagcgaaatgttcaccagcgccgcacccaccacgaacagccagaaactcagggcgttgagaaacggataggccacatcccgagcgccgatttgcaacggcacgacgatgttcatcaagccgacgacgaagggcatggccatgaagaagatcatgatcacgccgtgggcggtgaagatctggtcgtaatgttccggcggcaggtaacccggcccgccgctggcggccatggcttgctgggtgcgcatcatgatcgcatcggagaacccgcgcagcagcatcaccagcgcgacgatgatgtacatgcaaccgatcttcttgtggtctaccgaggtgaaccactcgcgccacaaatagccccacttgcgtttccaggtgatcgcgcccaccagcgccaccccgatcaggccgacgacggccagggtgtacatcacaatgggttcagtggttgggatcgcgtcccacgacagttttccgaacatggttaccgctcctcagccagcagacttgggtgttgatcggtgcgttgtgcagcgtcgctcaatggcgagcgctggggtttattggccttgttcatgccttcgtatttatcgacgatgtccaggaacaggcgctcctgtaccgacgagtaataggtcacggggtgcctgagggtgggcttggccaactgggtatagacgccgtgatccagaggtgtggccgcgcccttgacctttgtcacccagctttggaagtcggcagcgctcagcgacagcgtggtgaaatgcatgtcggaaaaaccggggccgttgtagttggcggcgatccctctgaactcaccggtctcgttggcgatcaggtgcaacttggtctgcatgccagccatggcgtagatctgcccgccgagtgcgggaataaagaacgaggtcatggccgcgtcggaggtgacggtgaaactcaccggcgtgtgtaccggcagggccagttcgttgacgctggcgatgcccaggtcagggtagataaacagccatttccagtcggtggccaccacctgcacattgatcggcggggtgtctgactccagcgggcgataggggtcgagtgcgtgggtggtctcccacgtcacccaccccaggacgatgatgatcagcaggggaacgccccataccaccgcttcgattttgtgcgaactggcccagcggggggagtaacgcgcttttttattggtggcgcggtagcggtaggcgaagacaaacatcatcacaatcaccggaacgaccaccagcagcatcaggcccgtagcgagaataatcaggtcgcgctcatcggttgctacttgccccttggggttgaataccaccaggttgcaactggtgagtaagaagaggctggtaatagtgaccaggcaataacccatcgctcgtttcatgccttgctcctgtgttggaaacttgcgttttgctgtgccgaatctgtgctcaagtgttaactaagcgaagcgcttattaacaccaggaaccatcaggtgataaacattcggcaataagctgccgtcagtagataaagtgcttctactgtccggttctattggcttttgctgccgctctgcagggcgcatttcgccgcgctcccgaacattttgaatagagcccagtgggttggtttaacaatttgtttcctcgcctgacgaacggtttaacaggcgaagcggtaaagggtttttatcggtgcatgatggaggtggccttggaaaaagtctgaattctggttaagaagttcagtcgttagttgatggccaaccccactaatggttttggagaagagctatgtttatccgtggcaaaacctatgaagcctgggccgccaaggcgctcgacgaagagtgctttacccaggaggttgaaaacggctgccatatcgaagtcagggcccgggagcgggaagatggcgatattgaagtgctgctgtgcgtctacaccgcgacggggcaatgcgtggttgaacgtaccaggcaattgccgggtgccgaatggacggtgcgggacgcgctcaagcgcggcattgatcaggcggaacggattgccggtggtgagtccggccgactgccctgtgctgatgcgcacttgcacgacgacgattgaagggtgcggtcgacggtcgagacctacctgaggccccgcgctgcaactgtgagcgggcttgctcgcgaaggcggccttacagccgacgcctaactaactgacgcccgcaatttaatgtgggagctggcttgcctgcgatggcggcctaacagtcaacacagttggtttgtgtacatatccattgctgtggttacggccacttagggggccgccctgacggcgggtcactttggaaaagccccaaagtaaccaaagggctcttgccccaccactcggcacctcgctcacgctcggtatgcccgaacacaggcttgaatccgtgggccgccgccacgcgccatccatggcgcggggcggctaacccggcgtcctgccgggttacccactaattcaagcctgcgttcggccagcgtggtttaacggggcgcttaagatcaagatcacaagcagatcaagagcaagatcacgagcggctcgcttcgcatcgtggttaccgtcggtcgctacgtcacgggagcaagctccctcgccacagggtgtagcgccgccgcaaataaaaaagcccgcacggagtgcgggcaagacaggagttttttaccaagagcctggagtgaacagactcactactaagaaacaaaagacgcatgagcggttttattttttttaatgcgaggccgacgaacggtagtgcgacggcaagtgtgtgatcgtcgtcattcaaacattaaaaattctgaaccttcgttctgagcaaataacaaaaaatcagaaggagaggttatgaaaaattctttatatgtcatcgaatacgaataccaccacgagcctaagtctttcattataagagcggaggtgatgaataacgcagaagcttggcattgggcctgttgcgatgcaggcattggcattattcccaggtcgcgtaatgaaaagatcaaacgcatcagcaaaccgctggccgagcgctacggtcttgagaatgtaagatggcgtccgtctgggagtatcccgtttattgcaaaaccctatgtaccaccgccccccgaatgaatgggtttttaatggatgatgtgcattagggggcggcaggaacgaggcaagtgtttactgttttttgcgtcgctcctgcaatatgcacaatttttgcacgctgcgttgcagcgcctctttcatgatgtcggctgcatactgttgcctgcacgccgggcacagcatgtctgacgctggcgacatcaggtagtccgggtcatccagcgttgattcataaggctgtttgcagtgcaggcaacctcggttcgcttgtagatgcgtcacatcgattcctccctgaatgaaacggccactctcaattaagaagtggacgttttcaactgctaaaaaggaagaattcaaacaagcgcttagttgatgttctattgccagtattttgtggtgatagttaggtagttgcgggcgcgtgcgcccgctcggttcgtggggtcaggtttttgccgttctgctgcgtacttttcgtgttgtgcagtttttgcctgataagccctaggaatgaatgaagctgctcacgaattccgccttgaccacgggaagttcgatcccatggatcaagccggcggtgagcgcttgttgcgggtcgagaatgcgtggcgcggcgatcaggtatttttcggtctccagtttttcgacggcatcggcggtgcgctcggcgacgatgcgtgcgtacaactgcaagtcatagtcgaggctcatcgcgtattcagacatgcgcgagtggtcaaccgcgccttgcacatgccaatgaaaggggtggaacaggaatttgctgtgtttgcaggcggtcctgcgctcaccggccaggaagatgatattgcccatggattccacggtgcctaggttatgggtatgcaccgggatcggcagggacaataaaaagttgtacatcgtaaagccgtagctgcattcaccacccatggtggcgatattcagtaccaggccctgggcatcttgttgtacggccaacgaggctttttcaatcagttggctgcacgtagaagcggtgaccggtgcggtgaagttgataatgtgtaaaggcatggtgtccctcatcaatgaaagcaggggagcattgctcccctgcatcaagcacatcagcttttgcgcccgccgccgtggctgtgttcgccacctttacgcccggcttcggaagctttttcgcggtcgttggcgaaattgccgccactgttctggccacctttgctgcccgcttcggcggcgcgttcggggtcattcttgaaattgccgccgctgttctggccgcctttgctgccggcttcagcggcgcgttcgggatcgttcttgaagttcccgccactgttttggccacctttgctgccgatctcctggtagaactctttgtcatgggacgcagaagtggcttcgccgccttttttaccggcttcgctgacgctcatttggccttgcttgtcttgagtagtcatgttcagttacctcgtcgttatgtcgggaatgtaacgttcacttcgattgtgctggaaacttgcactcagggcatgcgttaagctgcacggttacaagtgcctctcacacaagggtggcgttttagatgcacttatcgttgcttcggcaagttcaacaagttgctgatgttcgtaacacgcagatgtattagaacgcaggccagtccttgctttagtttgcacttctacaatcggcctgcgagctggctcgccgcgctgattatcaatggacgcacgcataatgaatgccctttgttaacgaacggaacagcggtagtgcctgtgtggtcaggacttacgtccacctccatgactgttctggccgcctttacgcccggcttccgaggctttctcgcggtcgttggcgaagttgccgccagaggcctgcccacctttctttcccgcctgtgatgctttttcgcgatcattggcaaagtttccagggtttttattgctcgtcgtcataacaatactcccagttttgaaatgtcgtttcgctagttacccgtttatgcaacggacatcttttctgataggggcaagtgcgcagatgttttgaaattttttaaaaagggcgatgaacggtagagtggcagatgaaacttgtacaagtaggctcaggaagtgccgcttcgtctaagtttttctgcgtcgattgatattgaattaatggcgaccttacggttggtttagcattccataccctgtttgatagtggtcattaaaggcgctggctcctctggccggcgctcagccgcacactctgttgctgcagcctgcacagactgcttgtatgctggcactctggaaccggttgccctgtgagtaccgacgttcgaatgatggctggatggaaaccggacttccttaaggtgctgacgtgaagcgtgatacccgtcttgtgatgctattgctgttggtgatcggctgttccctgacttcgttgacgatttggaaagtcctgtcttcccgtgaccgcgcgctagcggaagtggacgtgcatggcttgaacctgacccaggcccttaacacctataccgaaggcatcgtgcggcagagctcgttgttgttgctggggctggttgagcgtttggaaaccgaaggcagtggcccggtgcaaatccagcgaatcagtacgctgatcaaccgccagcagccgctgatgccgcagctcagcggcatcaccatttatgatcatcagggccggtggttgctgtcttccaatcgcgcgatcccggagggcgccaatagcagtgatcgggcctatttcatccaccatcgcgacgatccgagcgctgaaccttttattggcccgccgattcagagccgtgccaaccatgaatgggtggtgaccatcagccgccgtttcaacgacgcggccggcaacttcgctggcgtggtcgctgtgaccctgggagtggaaaactttctgcgggtattcggcaaactcgatgtaggccaggagggtgccatcggcctgtcctacgccgacggcacgttgctggtgcgctaccccttccgcgagcaggacatgggccgcaacttttcctcctcgcctatttattccaagtacttggtcgaccaaccggtgggcactgcggcctatacctccagcctggacggggtagagcggctctatgcctttcgcaaaagcgaaaccctgccgctgatcaccaccgtcgcgttgggcaagcacgaagccctcgcggcgtggcgtatcgaggcggcgctgtcagcggtcgtggtggcggggctgctggggctgacgggactgatcggctggtttctgatcctggatatccgcaggcgtacggcggcggaagaggcgttgcgtgtcgcccagcaacagttgctcgactccaatcggcaattggcgctattagcgaaaaaggacgcgctgaccggcctggccaaccgccgctgttttgacgaaacgctggccgtggaagcgcgtcgggcgcagcgcgaaggtacgtcgctggcattgctgatgctcgatatcgaccatttcaaacgctttaacgatgcctttggtcacgtcgcgggagatgcgtgcttgcaggcagtcagcacgttattggaaacgtgcgtgcggcgcccgtcggacctggtggcgcgctatggcggagaagaaatggcgatcatcctgcccgcgactgacagcacaggcgctgcggtggtcgcgcaacgcattctttcgcgcctacagcaggagaacatcacacacccaggcagccccttcgggcgcgtgagcgtgagtatcggcgttgcgacgggcatgggctcacggctggagccggtgttgggtttggtcgaggcggccgatgcagcgctttacggtgcgaaggcggcggggcgcaatgggttcaacgtgcatcctgcgcacgtgacgtcgagcggctgaaacggcttttacctgggtatgcgcggctcacatcccaagcgtcgggatcatgagttcgccgcactccatcagttggccagcggtgacttgcaactgcggggtgggtttggccgcatagcctgcgatgaagccggcacttagcagtgccaggcagaggacggcttttttcacaagcatgcgcagggtctcaatcggttcaaaagggtgaaccacagattgtgcattcgagaaaaggttcccgcccgcgcagaaggcaccttatggagctcagcgaatgaacctgacgtacacacgttcagggtcgttatcgtccagattctcgatctgcccgctgggaataaagccggctttcgtcagcagggcctgggacgcgccgttggaggcattggtcgacgcgaacagcttgggcgtcttgcaggctgcttcggccgctgacagcagacgaagggcgacgccttggcgctggtacagcggtgaaaccaccaccagcgcaataaacccatggttgaaaaagtcgtgggtgagcaccaggtagccggcgcacacgttagcgtcggcggctaccaagcattgctggcgaaccacggcgtcatagataaacacacgacggctggcatgctcggttgcgtaggcatccagtgcgaccaatgcatgcacatcgtcgggggtggcttggcggatcagccagtgtggggcagcgggaggaagaaggtattcagccatggtcgtggagcatcctctgtttgaacatttgcccccacgtgcttgatgacagtcccttgtgcattgatgaggcgatgctatcgcccgctatagcacagttacagggtgcgaaggggttacgtttgttggcctggttgcggtcgttgtttagaaatgtttatgtgttccaatggttatctcgacttgcgcaggaagcgcatcggccgaggccattcagtcttttaacagatacatcccaaggagtaacaccatgcaaggaagcacatcgttcaagtacctggcgttttcgttgatcccgttgattgccgcctgtaccacgcccacacgccagtccgccgtcctccctgcgccagccttgccgttcgataactgcgcggttggctgccccaccggcggcagcccagtgacgttgaaccgccaggcctacacgttgaacaacaacggttcgaccaagtttgccaattgggtgtcctacaagatcaccaaggccacggcggccagcgggcgctcccgtgactggcgcaccgacccggatattccagccggggaaaccctggacccggtggattacaacggcgccaacgtcgcgctcaaaatcgaccgtgggcatcaggccaacctggcttcgatggccggggtggccgattggcaaacgctcaactacttgtcgaacatcaccccgcaaaaggccgagctcaaccaggggccgtgggcgcgcctggaagaccaggagcgcaacctcagcaaggaaccaggcgtcgatcaggtgtatgtggccaccgggccgctgtatgagcattttgtcggctcgttgccgggcacgaacaaagtgcacaccatccccagtggttattggaaaatcatcgtggtcggcagttcgccggaaacgggcctgtacgcctcattcgtgatgaaccaggaaacccccaagggcgcagacttctgcgattaccaggtcaccgtggatcacatcgaagagcgctccgggctgacgttctggagcaccttgccgcaagcgctgcaggccacgctgaaaaccaggcagggccagttgccgaatcggatcggctgtaaccgcaccaaagcctgacgcctagtcggcacacaccaatgagggcctgcggctgctgttcttgcccaggcgctcatgcgtggcgacgtctgtggcctgttcacgcagtgcttcttccagtgcttgcaaatgcttggacaggatcttcaccgacccgctcgggttggcggggtcaaaggggatccggccattggcaatcagcaccatggccaattcccaggcgcgttgtgagtcgttcatgacaggggtttccttcttcaacgtggtcgatatagacgtgtgacccgcttcaagcgcccctatatcaattgggtttctgccgaaatttcgatcacttcaacgcttcagttgcgctggaaccatcatctttttagatggtggccggggcgagtcgaaagaatgaacctgagcggcgcggtggtcacctaatccgtatgaatcggtcgtttcccattcactgttgcgagggtcaaccatggactctgtactgcgggctatggcgatttacctggtactgctggtgctgttcaaggttgccggcaggcgcacgctggctgaactcaccacctttgacctggtgctgttgatggtcatcggcgaggccacccaacaggcgttgctgggcgaagacttctcgatgaccaatgctgtgctggtcatcgccaccctgattgccatcgatatcggattctcgctggtcaagcagcgttcagcctggttcgcgcgggtgctcgatggcgggccgacggtgctggtcgagcaaggccaggtgctgcataaacgcctcaagcatgcgcgcctggacgagggcgacatccttgaggcggcccggtccacccaagggcttgtagagctcaagcagatccgcttcgcgattcttgagcgcaacggcaagatctcggtgatcccgtttgaataacacgcggcccccattcgtcagccaaggggctattttttgaacgccagcgcctctattccagacagatagatcatgggcggacgaatcgtactttcgtcacgcgtacatcactcactcatcaacaggtgaaccctcatgaagaaactctatatgtgcctgggtctatgcagcgcgttcatgctacacggctgttttgacaacgccgataacgccaccaaagacaacaacagtggcacccagtcgtcagtgcagatgcaggaaggcaaggcggacgagagcaaataagccgtccaaacagccgacgcttaactcaagggtactcatcgcccgaatgtgggggctggcttgcctgcgatgcaaacacctcggtacatcagacaaaccgagtcgatgaattcacaggcaagcgcacaacacccctgctacggcatgtctcccagcagcgtcgcgacaaagtggttgtggaatcgacccgctggatcacaggccttgcgaaaggcgttgaaggccgcagttctctcgctgcggcgctgtgcaaggtccttcaggaattccgggttgaacggctcagagtaagttcccgagggttgagccgggttgtaaaaaccgaacattttgccggtgtgcggcatgccacccagggcaacccagtctcgttcaatatccgcaaaaaagtgcaggaggcgatccgggtagtcagacgccgccacagcgggtacgtaaccgataagatccaggttcacgaaggtagcgtctggggtttgcgtgtacgtcccggccaacgctgtgtccccaccacggacgaagcggaactccagcggggcaaccaccaggaagtcgctggtactcttgatccgtgcctttacggcgtcgagtccttgccaggctttactgaggccttcgtcatccagagccgggagctcgataaagtacgacatgaaaataacgcgtgaggccttggttagccacaagtctgagtagaccgccgcggcttgatcaaaaagcgtttcgatcgtaaggaacccagcgtcgatgattgcactcgccgttgtcgtgttattgccatactgggcggcgatgaggggcggctcgatgatgggctcaaacggtatcaggtagggggctccgaatacattctctcccgccagggcacaggcattcggtacgcttgtcttcaggttgggaacctgggtcgcaggggaagcaaccacatcccaccacaagatcaggaaattgtcggtgtagggattgagaaaggattcgacgcggtcatggtccgtaagcagcgccttgaaccgggcgatgaaggttggctcgtcagcgcagacaacgttggtgtctttgcctgcattcaacgtggttgcccatgggcggggcaatacatccagagtcactgaagtgacaacgcccaacgcaccgagggagacgcgtgcaaattgcaagggcgaccatccgtcgactgctggcgtctgtgcgtcaatggcccgcacctggccgtccggccccatgagggtgaacgccgaagcggtttcggcaaaaatcggtgcgcggatggttgcgccgtggacatcgacagcggtcatgccccccaggctgaagaagccgccggcggtcgcggtcttgagcatcaggtcatgggcggtcaggaaggcatccaactcatcctcgcgcacacccgtgttcacggtgatcgtatgtggggcggtgcccagcacaatagactcatccccgttcgggcccaagtctgcgtaacaggcgaggtcgatgagccagcggtcgggggctggggcgatgcgattgtcttcggcaaccaaggccggttgcgcgtgccgttggcccgatacgcgtactgtcgcgcctgccgcgccggcctggcgcacgatgtcttgaagcgctgccagatgggttggggagaagtagtattgaccatcgatttccagggtgtcgacgatgttctgagcccagtttttccacggtagcggctgaaccttgaaattcaaggtcgttcccgtgacttcataggcggccagcctgccgttattggccgactgaactaaaggttctccttgattttggatgcctgcgacggcggacacataaggcgtgacgccaattgcatccgcgggaatgccgagcaatgcaagtgaaggactgaccctgtacacaccattttcgaagttgccactgttccaatcgcaggtatgccattggccggccgaatcaagccactgaatcgaaaagttcatgacaaaaatgccgttgttaaggcaaccaatgcgttcgacttgtttcatgttggtgtcctgttacgtggtgtttaacgtcaggtgagttgagagtaaaaaagaaagccggcgccaacttccaacggcaagtcacgaaaagtgggggccggataccccgtggtaaagaacttgatttattcgatcaagttaatcgcaaagccgatgagggttgttcctaccgcatcgtaggtcgcgatctggccgtttgcggcaaaccccacaaacggcgtgccttggcctgatgacccggccagtgcatgcccatacaccgtgacggccagcgcgtctgaaggcacgccgatggtttccagattcggtgtggtccgagactgcgccaccggatagtcaccgctactccattgggacgtgtaccacttgccgtcgctcttgagccattggaccttgaagttaaacacgtaaccgcctttgttattgacggtgattttttgaacttgtctcatggttatctcctgctgaagcaataattttatatgagcacgcctgcgcccttttgcgtggcgataagacgtgtttattaagggcgtgaattgcactgcttagaggcaatgggagacgcagaaatcaaataggtcgcctcgctccctatttactgattactgtcaagtgagtgagcctgttttcgcgcactgacctacaacaacgagtagcttggataatccatttataacgttcgataacgtgggcagttggatcatatttagcggggggtagcctccgtggctgctgggtgattcctttctgatactgaggggaggttagtcgcggtaccgattgctcgccagtggggcagaaaactatttggctatatgctccatttcggaaataccagtcgtttcgctgcctgtgctcagaggcagtgcaccccttgggcctatcaacggccacaagcgctgcaccgcctggtcctcagcgcatatgcaaaataatcgggctactgctcgcagggtccgtatgcccgcgcaacttgctaacagccttcgcatcgaccgcgccgccgtggttgccccaggtaccacgcacgtagctcaacacgtcggcgatttcctggtcggacaattgctcacgaaatgctggcatgcggtaggcgtctggcatcccggcggtgaccacacgttgcgagccgttgagggtgatgttgatcgccgaagcattttccgtggccagggccgaggtggcgcctgccaggggtggcatccagtcgggttggcctttgccgtcgaggccatggcaggaggcacagcgggtggcgtaggtgtgggcgccgggggcatccgagcgcgccgtgactgcctgatactgccaggggctgccgtcacgctgtgggtcgccgggcagtgacttcagatagcgagcgatcgcggccaggtcatcatcctgcatgaactgcgtggagttgttgaaggcttcggtcatggagccatagaccacggcatgctggttgcgaccggtcttgaggaactgcacgatctgttcctcactccagcggcccaggccggtgttgtggtcctggcgcaggctgggggcgtaccagccgtcgagcagggcaccggccaggaatggcgcgccggattcgtccagggctttctcgttgaacgctagcccgcgtggcgtgtggcaactgccgcagtggccagggccttgcacgatatacgcgccacggttccacagcgcgtcccggccgggcttggcggcgtaggtcgcggtgggtgcaaacacaccgttccacagggcgatgggccaacgcaggttgagcggccagggaatgtcgctgggcaggttaggttcgttggccggttgcacgcctttcatgaagaacgcgtacagcgcctggatgtcgtcatcgctgagtttgacgtaagacgggtagggcatggccgggtagagccgtcgcccacccggcgccacgccgtggcgtaccgcgcggtcgaagtcggccaggctataggtgccgatgccatgctcgcggtcgggggtgatgttggtggcgtggatcgctcccagcggcgtggccatttccaggccgccggcgaagggcgtcttgcctggcaggctgtggcaggccacgcagtcacttacgcgggcgacgtattcaccgcggctgaccaaggcggggtcgaaacttgtgctttgctgttgttcaaaaggcgaggcgggctggcgtgtgacgtaccaggccagcacgccagcggcgaccacgcagggcagcaccagccaccctgcggttcttgcgaatcggcggttattcatgggcattccctgtcggttagctgaaggtgtaacggctcaaaggcagactacggatgcgttggccggtcaattgcgccacggcattcgccacggcgggggccacagctggcaacggcggttcgccgatgccacccatcttttcgccgctctctacgatcttcacgtggacctgcgccatacgcgaaggcggcagcactggataaaggtcgtagttgcgcgcccgtggcttgccatccacgtacaccgcttcctctaacaaggtttgcgacaggcccaaggccacggcaccgttgacctgcgcctccacgatcgccgggttgacgatgctgcccgggtcaatcgcttgccagatgtgatgaaccttgacctggccgttctcgatcgacacctcggccaccaccgccgcatgggagccaaacggcgaagccatggctacgccgcgtgcacggcgggtgccgtcttcggcggtgtaaggcccacgcttccaaccgccagacagctcggcggccgcctgcagcagggtggtcaggcgcgggttgtcgcgcagcagatgcaggcgcagttcataggggtcatggccgcctttgtcggccagttcgtccaggaacgcttcgtagaaaaagtcattgagcgagttgcccaccgaacgccagtaaccgagcatggccgggcctttgacgtagatctgcgcgatgcgtttgttggggatcgcgtagctcttgcccgacaagccttccagggcggtagggtcgatggcgtcgccctgtttgccggcgatggcttcggtggggccttcggtggcgctcaccgcttcgatggccacaggcaggcctttgtcatccagcgcggcgcggaacttgaccacggcgaccgggcgcaatacatcgcgcacgaactcttcttcacggctccagatcagcttgatcggccgacccaccgccttggccagcgcgatggcctgcgggtaagggttggcggagtcatacaggaaatgccggccgaaaaaaccgcccagcagcggcgagtgtagggtgatttgctcagtgctcaggccggtgcgtttggcgatgtcggcacggaacatatccggcgcctggttaggcagccacacctccagcgtgccgtcggggttaaagcgtgccagggctgaaggcggctccaactgggcatggttgaggtactggttgtggtaggtggcttcgacgcgggtcttggcgctggccagtgcgccgggcacatcgccttcgttttcctcatcgcgggccgggccttgctgggcggcaaggaagtcgcggtacttgtcgctggaaaaatccgccggcatcgcccgcacagtggagtcggcggcggcttcaagccactccacctggatggcttcgacggcgcgcttggcatgccaccaacgctcggccaccacggccacggcgccgggcagggtgtgaaccgaatgcacgcctttcatggcttgcacctgcgcctggttgcgcaggctgcccacggtcatgcccaggcgcggcgcgtgttggaccgccgcgtggagcatgccgtcgattttcaggtcgatggtgtactgcgccttgccggtggatttgtcataggcatccaggcgcttgaccggcttgccgatccagcggaactggcttggatcgcgcagggtgatactggccgggtcgggcaccggcatatccagggcgcgcccggccagttcgccgtagcccagggagcgaccggaagcggcgtgcaccacgcgaccgggttgggtggtcagctcgctgagcggtacgcgcagttgctcggcggcagcttgcatcagcatcgcgcgggcgagggcgccgaggcggcgcatggtcgggtagctcatgcgcaccgacatgctgccgccggtgatgcgcatgccattttccatcaccacgtaggcttcgccgggcggtgccgcttcgacgatgaacgtggccgggtcggcatccagctcttcaccgacgatctgcgccatggcggtgtgggtgccttggccgccttccatgaaggggctgagcaggcgcacgctgccgtcggggcgaatttccaggaaggcgggcacttgagtaccgtgttcagccgcagcgccggtcgcggcttgcacgcgggaggtgcccagcggcaagccgaagccgatcaccagcgcgcccacagcggtgctggccaggaagcggcgacgggacaagttgatcggttcgcccagggcaacgccgggaatgatctcgttggtgttcatcaggcggtctccttcccggcggccaaggcgtccatggcggcatggatggcgttgtaggtgccgcaacggcagaggttgaccatcgccgcgtcgatctgcgccttggttggcgcgggggtgtgcttgagcagcgcggtggccgccatcacctgcccggactggcagtaaccgcattgcgccacttgatgttcgacccaggccgccaccacacgcttgcccacgtcatcggcctccacggcctcgatggtggtgatctcacgaccgaccacgccggccacgggcgtcacgcaggcgcgcaccacgttgccgtccaccagcaccgaacaggcgccgcactgggccaggccacagccgtatttggtgccggtcatgcccaggttatcgcggatcacccacaacaacggggtgtcggcttcggcatcgacctgataggccttttggttgatacgtaattccatgcgggctcacctgctgatcatcggttggtggtgctttttcttatcagggacgtgcgcggtggcatgccctggtgtcgctcatgggcgacgggttatggcggcggggttgagaaccggtttcatcttggccacgcgcgcatggttggactctagaccacggcgcaaggggtatctatcccggcaggcgataagtcggaggatcaggcaagtattcgcgaggattgagcgatagaagcagtggctgatccgagattttgactgaagtcccggcatctctgtgggagctggcttgcctgcgatggcgccctgacagccgacgctgttataccgtgtacatatccattcctgcggtaacggccacttagggttccgctctgacagcgggtcactttggaaaagccccaaagtaaccaaagggctcttgccccaccactcggcacctcgcccaggctcggtgtgcccgaacgcaggcttgaatccgtgggccgccgccacgcgccatccctggcgcggggcggctaacccggcgtcctgccgggttacccacgaattcaagcctgcgttcggccagcgtggtttaacggggcgcctgagatcaaaagcagatcaagagcaagagcaagagcggctcgcttcgtatcgtggatacccatgctttcgcatggtcttcacacaaccccatcaatcaaaatatgcggctgcccccggctgcagcgctcgatgcgtgcctgcacctggtaaacctcgcgcagcatcgcttcgttgatcaccgcctggctcggcccgcagccctgggctgtgccgtcggcgatgaccagcacctggtcggcaaagcgcagtgcctggttcaggtcatgcagtgcgataaacacaatcacctcgcgtttgcgcgccagggtgcgcatgaaatccagtacttgtacctggcgatgcatatcgagggcgctggtgggttcgtccatcagcagtacgtcgggttcgcgcaccagcgtctgggcgatggacaccagctgttgttggccgccgctgagttcaccgaggttgcgaaaggccaggccggtgatgcccagggcgctgagcatttcgtcgaccaagttcaactcgtcgtcttgtaccacccaccccggcgtcagttgtttacgcgccagcagtaccgattcgtacaccgtcaaccgggcgctggcgttcagtccttggggcatgtagctgatggcttgtgcacctttttgcgagccctgcagcagcacctcgcctggcccgtcgatcagcccggccatgcgcttgaacagggtggatttaccggcagcgttgggcccgaccaccgccaccacctggccgccgacaaaggctgcggtgttcacgtcgcggatgatggtgcgctggccgtagcgggcgccgaggtctttcaactggagacttaccatgagtttttcttgccgcccaggatcagggatataaagaacggcacgccgatcagtgacgtaaccacgcctattgggaaaatcgcccccggaatcagggttttgctgaccaccgagctggctgacagaatcaacgcgccggtgagcagcgaggcgggcaggaagaagcgctggtcctcgccaatcaacatgcgtgcgatgtgcgggcccaccaggccgataaagccgatggtgccgacaaaggcgaccgggaacgaggcgagcaggctgaccatgatcaacgtttgaaagcgcaggctgcgcacgttgatgccgaagctggcggccttgtcgtcacccatgcgcagtgcggtgagggcccaggcgcgcttggcgaaaatcggcagggtgaccaggatgatcaggcagatcacccccagcttgggccaggtggctttggtcaggctgcccatggtccagaacaccacggctgccacggcttgttcggtggcgaaaaactgtaccagggccagcagcgcgttgaaggtaaagaccagggcaatgcccagcagcacaatggtttcggccgtcaccccacggcgcaggctcaggaagtggatcagcagcgccgagagcatcgccatgatgaacgcgttgaccggcaccatgtactgcgccgccagcggaaacaacgccactccaaacgccaggcccatggccgcaccgaaactggcggcggcagaaatgcccagggtaaaggggctggccagcgggttgttgaggatggtctgcatctgcgccccggccagggacaacgccgcgccaacggcgaccgccatcagggcgacgggcaggcggatgtcccacatcaccacacgcacttgcggcgcggcactgtcgggcgagaacagggcgccgagcacttcgctgaggctgtagctggccgggcccagggccaggtcgagcagcacgctgcacaacaacagcaatgccagggcaaggaggatcaggcgtttgcgtatcaccaggttgcggtaggtcggggcgctcatggcttgaggctcacgaagtaacccgactcataagggacgggcaggaagcgttcgtgcagttctcgaaacgcagcgtccgggtccaggtcggcaaacaggtcgggatgaaaccacttggccagttgctggatcgccacgaactgatacgggctgttgtagaactgatgccagatggcgtggaaggcttgcgggccctgggccttgataccggcataggcggggcgctgggtgtaccacgccagcttggctcgggcctgggccatatcggcgcccggccccacgccaacccaatgcccgccgggggcaaacgcctcccaattggcgctggtgacaacgacctggtcggggttggccacgatcacctgttcggggttcaactggccaaaggtggtgggaataatgcctttggcgatgttgtcgccgccggccatctgcacgaacaggccgaagttttcattgccaaaactcaggcagcagtcgtcggtgtagccaccgatacgctcgataaacactgacgggcgcgccggttgctgcgccgcaatcacgtcggtcacgcggcggatctgctggttgcgaaacgcaatgaaatcctcggcccgttgctctttgccgaacaactggccgaacaggcgcatggtcggctcggtgttggtcatcggttggttgcgaaaatccacgtacaccaccgggatgcccaaggcatcgagcttctcgatatagcgcgcatcctcggtggcatgctgcgcctcgatattgaggatgattacgtcagggcgttgggagatggcctgctcgatatcaaaggtgccgtcttcaaagccgccgaaggtggggatcttggcgatggcgggaaacgcgcgcaggtaggcgttgtaggtgtccgggtcggactggatcaggtccttgcgccagccaacgatccgttcaatcgggttttgcgtgtccagcgccgccaccaggtacagctggcggccctcgccaagaatcacccgctgcaccggcagcttgaccttgacctggcgcccaagcagatcggtgacggtggtcagcgccgccatgctcggcaggctagcccccaacaacccggtgaacagcagcgccgctagaaggcggcaacgtcgaacaatgcagatcatgaatcaagcccttgcaggtgtcagaaatcgaccgtggccgagaggaggagggtgcgcggcgagccttgggaaaacgcaccgtaggaggcgacgcctgaccaatactcgcggtcgaacaggttctgcaccgtggcgcgcagggtggtcgggtgctcggcgatacgcgtgctgtagcgtgcgccgatgtcgaagcgggtccacgcatcgagctgttgggtgttggcctggttgacgtactggctgccggtgtagatggcgcctgtggtgagcgtcaggccctcgacccatgaggtgtcccattcggcccacaggttggcttgcacgtcgggcacgcccaccggtgtgttgccggtgttggcggcaatcgcggttttggtcagttgggcatccagcagggtcacgccaccgagcaggcgcgtgccgtgggcgacttcgcccaacacattgaactccaggccgcggttgcgctgttcgccctgtaccgagaagcgcccggcggccaactcgccgctgggcttgtggatctggaacagcgccagggtcgacatgaaggtgccgtagtcgaccttgaccccgacctcatgctgcttggacacgtaaggcgcaaacacctcgccggcgttggcggcgttggaaggcgccacgtcacccttgctcaacccttcaaggtagttgtagtagaacgccacatgctcccagggcttgagcactgcgccgaacagtggcgtgaccttgctgtcgtcgtaggtgctggtggccccgccggcgctgttgtagttgctggactggatacgctgctggcgcaggccgacggtgacttgcacgcgttggtcgagcaccgacaacgtatcggcgatggctacgccggacagttcgctggctgatactttcggcgtggcgggcttggcgatcgcaggcttgggccggtccaccgggtggtagagattggacagcaccggggccccggaaataatcccccgcgacagctcgtcgcgataacggctggcctgcacggtggcgctgtggctgatcggcccggtttcgaagcgcagccgcgcaccggcgtcgaccgtgtagcgctgcacatcgaaacggtaataaccggggatcgaagacgtgtcgccggcagcgttgatgagggtcggcgtctggtcggacatccgcgctactgccgatttgccgccaccggcatgggcaaacagtgtgagcgcgtcggtgaggtcgtattcgccgctcagcagcgcggatttatctcgcgtgcgcgaccagccccagtcctggctgacgttggtgcggccgttggcggcggaggggacgtcgacgccggcagcaatcaggaaggggcgcgaggcggcgtcgagtttctcctgctgggaaatcagatcaaggctggtgcgcaggcgttcgccctggtagtccagggacagcgcgccaatgcctatatcgcgcgactgctggtcgatcaccgtgtcaccgttctgcaggctaccgttgaggcgtacgccgaagcggcgctcgtcgccaaagcgccggctgatatcgaggtggctgccgacctgcgcgtcctgggtgtagctggcggtgtagcgggtcaggtcttcatccagggagcgcttgggcaccacgttgatcacgccgcctaccgcgctgttgggtgacatgccgtacagcagcgcaccggggcctttgaccacttcgatgcgctcggcgtagtcggtaaacacccggtagttggaggccacgccgtacacgccgtcgaacgccagttctcccaggttgccttcacccaccgggaaaccgcggatgaagaacgagtcgacaatcccgcccgtctgcccggtggagcgcaccgaggaatcacgctccagcacattgccgaccgtggttgcctgctggtcctggatcagcgcggcggtgtaggcgctgacactgaacggcgcatctatcacgtcggtattgcccagcatgcccaggcgcgcgccggtggctgcctggccgccggcatacagcggcggcaggtcgctggcgcgtggctcgggggcgctgacggtgatgtccgaaagcgtgacttgacccggcaccagggtgtagctgccgtcgctgcgctgcaccatgtccaggccactgccggccaacagccgcgtgaccgcttcctggggcgagtaacggccggataagcctgggctggtcaggccctcggtgagtgccgggagaaatgacagggcaataccggcgtccacggcaaagctcgacaacgtggcgccgagcgggccggggtcgatgtggtaggtgcgcaccgtcacgctgtcccattgcgccggcacgtccgccagggcggcaccggccagggccaggctgagcagcgcgctgcgaatcacaagcatggagggcagccctatggacgaaagggaaaaggggtatgagtgtttgccagctgagcgcgaaaaaagtatcacccgcggcgcgttttattttggcgccgcctcaagccggcgacaggctgacccaataaccgttcaaatggccgctggcgcgcaccgggtaggtctgcaccagcatgttcaaggtgcgctgggtatcggcgatggggaaggccccggaaatacgcaggtttgcaagggccgggtcgtagcgcacgaagccacgccgatagcgggtcagttccgcgacaaagtctgccaggcgcatgttgtcggccatcagcatgccttgggtccaggcgctgatattgcggtcggcgggggagagcgcgccgaactgttgcgcggaaaaatccgtgcgttgcccggcgctgacgatcagtggcgcgctctggctattgtcggccagcttcactttgaccgcgccctcaagcaccgccagatgcgtgcgtgcgcccagttcgcgtacgataaaacgcgtgcccagggcgtgcatatggccctggcgggtgctgaccaggaacgggcgggatgcatcctgtgcggtctgcaccagtatttcaccttcgcgcaggctcaccaggcgttgctgggtgtcgaaccgcacgtcgatggcggtctcggtgttgagggtcaggcgcgagccgtcggccagggtcagttcgcgacgttcgccgatgcgggtgcggtagtcggcgctccattgctgggactgcgccagcttccagctgccccagcccaccggcattaccgccagcaacaaggccagtttgcccagggcttcgcggcgttgggggttgctcgggcggtccagcgccgacatcgccagggacggcggcaggccaccgagcttgctttgcagcaattgcgcgcgcgcccaagcccggccacgctcagggctgctgaccttccagcgctcccactcggcgcgttcgctggcgctcaattcgttctcgctcaggcgcatcagccattcggcggcctcttcaagggcgtcggtgggcagcggcggttccttgcccaggctgagcacttattccacccgcatcaggcactggacgagtgcctgtttcatgtagcgcttgacggtaatcagcgacacgcccaattgctcggcgatgtcctggtatttgaggccgttgagctgcgacagcaggaacgcacgcttgaccagcggcggcagcgcgtcaagcattgcgtcgatttcgtgcagggtctccagcaccagaaagtgcgcttccggcgacggcacctcgtgggccggcacgctggcgagcgcttccagataggcacgttccagggccttgcgctggtaccagttgaccaggatgcccttggccacgcagctcaggtaggcgcgtggctggtcaatcaccgtgacctgcgaggccaggatgcgggtgaaggtgtcctgggccaggtccgccgcatccatggcattgccgagtttgcgtttgagcgtggcgtacagccagccgtgatggccgctgtacagcgcctcgattgcgcgcaggtgaggggtgttatcggcgggaaggctttcgctcatggcgcgcaaccgtgcaattgagaagtattcccaatgctaagtgcaaacccgtcggttgcgcaacgcgagaatcgcaatcagcgccatggcataggccacacacacaaacaggtaggtgtacgccaagccatagacctggctgagcaagccgccggcgcagatacccacgatcgaggcaaattgcgccgtgccctgggcgatccccagcacatggccttgctgcgtgctgtcggcggtccttgaaaccagcgccatcagtaccggcgtggtcgcgcccagcaatacgccccagacaaaataggcgagcacaaacaccagcgggttgcgggtgaggccggcgagggcggtcagcgcgatgcagccggccaccacccaggtgaggcggcgcaagctgtctgcctggctgcgaccttcgaactggcgcgcccaggcggtggccgacaggataaaacccagggccagcaagccgtagcacaggccgaccagggcattgctgacggcgaacgtcgtactcacatacagcgcgaacgaggtctgcggcagcatccgcgccagcagcagaatgcccatcaccgtcaacagcggcagcagggccgaggcctgccaggtgccgcccgttgagggggctgtggttttcttcaccggtggcacgttcggcaaggtcagcgctgcaatcaccgtgcacaccgcacagagcgccgcggcgctgaggttgatccagaagaacgtcgcatggtcgaggatcaagccgccgaccacggcgccgagcagcgagccgacgttggtggaaatctgcagcagtgcgaacagccgtgcacgccgtgacggcacctcgatactcacgccatacgcctgggccggggcgatgtagccggcacagacgccttgcagaaaacgcagcaccagaatagtccagaggtcgctgaacaaggccagccccagttgcgtcagggtcaggcccgccagtgcgcgaatcatcatcagcttgtggccgtagcgatcgccgatgcggccccagaacgcgctggtcaacagaatgccgagcatcggccccacgtacacggcgacgctggcgaagctgaacagcgtgtcggagtcggtcagttggcgtaaatgcaccggccagaacggcccgctcatttccatggcgcccatggacacaagctggatcgtgaacagcagggcaatcaggacgcgggtgggtggcatggagcagtctcgctatacaaaaaaagtcgcggctggggtgatactttttcacgcgtcgactggcatcaagcgtaattctcacttcacttgatcaaagggccctgacgtcatgcctgttgccagccggttaaccctcgctattcgtaccgccctgttgctggctgctgccagtggcaacgcctgggccgccaccgccgagtcaaccgacgacagcgcgcagagcctgacccttgacgcgacgaacgtcaacgcccgctatctgggccccaccgacctgcccgaggtgctcgctggcggccaggtggcccgtggcgcgcgcctgggcatgctgggcaacaaggacgtgatggacacgccgttcagcgtgaccagctacactgccaagaccctcgccgacctgcagacggtgaccgtggccgatgccctggagcgcgacccctcggtgcgttctaccgggcagactggcggtattgtcgactcgtttttcgtgcggggttttgcgattggcgagggcaacctgggcgagttggcctatgacggcgtgtatggcgtggcccccaactaccgcgcattcaccgagtacgccgagcgcgtcgaagtgctcaaggggccgggggcgctgatgtacggcatctcgcccaacagcggcgtgggcggtgtgatcaatatcgtgcccaagcgcccgctggaccaggacctgacgcgctttaccggcagttatgcctccgacacccaagtcggcggtcacctggatatcagccgccgtttcggtgaggaaaaccagtttggtgtgcgcttcaacggcagcctgcaagggggcgacaccgccgtggacgatcagcatcgcgacgtgggggtgggcgccattgccctggattatcgcggcgagcgcctgcgcctgaacctggactacatcagccagaaagaaagttttgaaggcgcctcgcgcccgttcaccctggcgccgggcgtgcaggtgccttcggccccgaatggccgcaccagcctgccgcagaagtggggctggtcggacaccaaggagcaatcggccttgctcggcggtgaatatgacctcagcgattcgctcaccgtgttcgcccatgccggcggcgggcggtcggatgtcaagcgcctgtcggaccaggtgccgcgcatcctcaatgatgctggcgacaccagtaatattccgggttactacaagttcaacgtcgaccgttccaccgccgatgtgggcctgcgtgcgcagttcgccaccggcccgatcacccacaccaccacgctgatggcgacccgttaccaggatgagctgtctcgcggcatcaacaacggcaccgaaatccgctccaacatctaccacccggtggacacgcccaagcaaaacctgcgggcgccgaaagtgctgcgcatctccgaatcggagctgtccggcgtggcgctcaccgacaccctgggctttctcgatgagcgcatccagttgaccctgggcgtgcggcgccaagacatcgagtcgcgtaactacaacgccgcaggcgcggtgagttcgcgctacaaggacgctgcgaccacgcctttggtgggcgtggtggtcaagccctgggatgacgtgtcgctctactacaactatgtcgaggggttgagcaaaggcgatatcgcgccgggtacggccagcaatgccggtgaaaccttcgcgccttatgaatccaagcagcacgaactgggcgtgaagtatgaacacggcaccctcatgaccaccctggcgttattccagatcgagaagcccagcggcgaattgggcgccaacggtgtgtactccgtgcaggccgagcagcgcaaccgtggtgtcgagctgagcgtatacggcgaagtggcgcctggcacgcgcttgatgggcggcgtgaccttcctcgatggcgagctgacccagtcggcgagcgccgccaaccgaggcaacaaaccggtcggcgtgcccgatatccaggccaacctgtgggccgagtacgacaccccgtggctggaaggttttaccctcaccggcggggcgatctacaccgacagccaatatgtcaaccaggccaacacccaggagctggatgcctggacgcgcattgatgccggcgtccgctacgcgaccaagatcgaagggcggcccaccaccttgcgcgccaccgtgcagaacgtatttgaccgcgagtactggtcgggcgtcgcgtcttacggcgccttctcgccggggtatccacgtactttgcagctgtcggcgacggtggacttttaaccctgccgcctagcggaacccgcccgagagtttgtccttcaggtagttgaccaacgcactcaccgacttgggtacatggggcgagtagggccgaatcaggtagatctcatcggcaaacgcgcccttgagggtccagtccttgagcacctgcaccaactgaccagcggccagcgccgcctgggcgctgaagtccgggagcagggcgatgcccaggtggttgagtgcggcgtcgcgcaaggcttcgctgttattggtggcaaagctgccggcgatgggcacggtgaggcgctcgacggggtggctgccgcgttcgaaggtccaggcgggctggtcggtgccgcgtgggtaaaacaggcagttgtgggccgacagctcgcccggctcgcgaggttcgccgtggcgttgcaggtaatcatgggtggcgaccagcactgaggtggtgtcgcacagcttccaggccacgtgggtttcgggcacctggaagccgtggcgcaccgccaggtcgtaaccttcggcggccagtgagctcaaggcatcggagacgtctagttggatacgcacctgggggtactgctgcaaaaagccggacaggtgcggcaccagctgttgccgggcgaaggccacgggagcggtcaggcgcaccagcccgcgtatttccccgaccgagtcgcgcaccgaggaaaaactacgggcgatctgcgcgtaggcgctgcgcacttcgcgagtcagtgacagccccgcatcggtcagccgcacgctgcgggtggtgcgcgtcaccaggcgcgtgccggtggccttttccaggtcggaaatgcgctggctcaccgctgacttgctcacccccaggcgcgcggcggcggcggtgtaggtgccttgttcctccagcaccgacagccagtgaatgtgggtccacagcccttcgatctcagccttttccatgggtgcattgttcgcatataaggacaataagttctggattctgctctggttcggaacaaagcgaaagcctatcgtgtggcccaacgctacccacctggatcgactgccatgactgcaaccatcgagcactacatcaacgaccagcgcgtcagccgcgatgaccgttatcaggacgtctacaacccggccactggtgaagtcaccgcgcgcgtggccctggccagccgccagaccgtggccgaagccgtcgccgctgcccaggccgcttttgccggctgggccgacaccccgccgatccgtcgcgcccgcgtgttgttccaatacctgcacctgttgcgcgaacgcaaggacgacctggcgcgcatcatcgttgccgagcacggcaaggtgttcaccgatgcccagggcgaagtcgaccgtggcatcgacattctcgaatttgcctgcggcattcccaacctgctcaagggcgaacactccgaccaggtctcccgtggcatggacaactggacgatgcgccagccgctgggtgtggtcgccggcgtgacgccgttcaacttcccggtgatggtaccgatgtggatgtaccccatcgccattgcggcgggtaacacctttatcctcaagcccagcccgactgacccaagcgcttcgctgttcatggccgagctgctgcatgaagccggcctgcccaagggcgtgttcaatgtggtgcagggtgataaagagtcggtggacgcgctgatcgaacacccggacgtcaaagccgtgagcttcgtcggctccacgccgattgcccaatacatctacgagagcggcgcccgcaacggcaagcgcgtgcaaggcctgggcggggcgaaaaaccatatggtggtgatgcccgacgccgatatcgaacgcaccgtggatgcgctgatgggcgccgcctacggcagtgccggcgagcgctgcatggcgatctcagtggcggtgctggtaggcgacgtgggtgacaaagtcatcgccgccttgaccgaacgcgccaagctgctgcgcatcaccgatggtcgcgatttgaaagccgagatgggcccgatcgtgtcgcgggctgcgctggaacgcatcagtggctacatcgagcagggtgtacacgccggcgcgcagttgctgctcgatggtcgtgactacgtgcccaccgaacccggcctggaaaacggcttctggttgggcgcgaccttgttcgaccacgtgacccaggacatgagcatctaccgcgaagaaatcttcggcccggtgctggcctgtgtacgggtcaacgattttgccgaggcggtgaagctggtcaacgatcacgagttcggtaacggcgtcagctgcttcacccgcgatggcaacatagctcgtgagtttgcgcggcgcatcgaagtgggcatggtcggtatcaacgtgccgatcccggtgcccatggcctggcacgggtttggtggctggaagaagagcctgttcggggacatgcacgcctacggcaccgagggtgtgcgcttctacaccaagcagaagtcgatcatgcaacgctggtcggagagcatcgagcagggcgcggagtttgcaatgccggtgtccaagtaaggtttaagctgtgctgctggatctgatgtgggaaggctcaagccctcccacattttttttgcctgttgacggttaaacacataaaagtccagtatggaattataagtacaaaatagccgctgcccgtttttcttcactcttgccaaaccaacaacaacttgcgagaacccctccatgaagaaacgccatctccttcccgccctggccctgagcctgttcgcctccagccacctgctggccgccgagaaaaccctgcgtatcggtatcgaggcggcttaccccccgttcgcctccaagaccggcgacggcaagatcgtgggtttcgactacgacatcggcaacgccctgtgcgcgcaaatgaaggtcaagtgcgtgtggattgaaggtgagttcgacgggctgattccgtccctcaaggtcaagaagatcgacatggcgttgtcgtccatgaccatcaacgaagaccgcaagaagtcggtggatttcacccacaagtactacttcacctcgtcgcgcctggtgatgaaggacggcgccgtggtggatgaccagtacgccagcctcaagggcaagaacgtcggtgtacagcgcgctaccaccaccgatcgctatgccaccgaggtgttcgagcccaagggcatcaacgtcaagcgctacagcaataacgaagaaatctacatggacctggcagcggggcgcctggatgcgatctttgccgacaccattcccctgagcgacttcctggcgatgccgcgcgggcagggttatgcctttgtcggcccggagctcaaggacccgaaatacgtgggcgagggctcggggattgccgtgcgcaaaggcaatacagcgttggtcagcgaattgaacgcggccatcgacggcattcgcgccagcggcgaataccagaagatttcacagcagtacttcaaggccgatatctacggcgactgaatcacgcaaagacgcggtcaatgtgggagctgtggagccccggcgaggctgcgaaagcggtgggtcaggcgatgaaaatgttgaccttgccggccccttcgcagcctcgccggggctccacagctcccacagggatcggcgttgtcgtcagaaaggggtcagcccttgagttctttcaaatgcttgtagaccgtcgcccggcccatacccagcacattggccacatagttggaggcgctcttgcccttgaatgccccctcggcatgcagcgccagcaccagttcgcgtttgtggtcgcgggtcaacaggttcaggctcaactgacgctcgcgcagccaggcatgcagaaaggtgttgatgcgttcctgccagtcatcacggaacagcgcgtccggctgtgcgatcagcttgctcggcgacaggaacaaatccagcgccgccttggccgtttcgaacattgaaatattcaggttgatgcacaacacagccagcctgcgcccttggtggtcgtgcagcacggtgctcaggctgcggattttctggccgtcccagttgagcttttcgtaagggccgatattcacctcgctgacgtcaccgtcgagcatgtcctccagggatgagtcgtcacccaggctgcgcttggacaggttattggcgatgtaatccacggtttgcgtgcgcaggtcatgcagcactacttctgcatggggaaagaacagcgtggcgattgcatcggcaatcgcgcggaagttctgcatgaccttgtcctgttcagcggtgttcatcaatggggctccaggcggatcggggagagcataccagcgtccaggccgaaccgggtcagtgcctccggcagcggttcgccgcgcaccagggcggcgcttgcctggcccatggccggtgaggtctggataccatagccgccttgcgctgccacccagaacagccccggtacttgcgggtcaaagcccgacagcaaatcaccgtcctgcacaaaactgcgcagcccggcccaggtgcgcgtggggcggcggatggtcagggtggtggcttcctcgatctggtagatgcccatggcgatatccagttcttcaggctgcacatcctggggttctaccgggtcggcgttggctggcgagccgaggaacatgccagcatcgggtttcatgtagaacgcttcgtcgagggccaccagcatcggccagtcgtggctgtccacgccctcggggccggcgaagacaaaggccgagcggcgcttgggctgcaagccgatggacgccgcgcccgccagcccgccgatatggtcggcccaggcgccggcggcgttgatgatgaccggcgcagtgtagatcgcatgctgggtgcgcacctgccacaggccgtcggcgtcgcggctcaagcccagcacatggctgtcggtgcgcacgtcgccctggttgcggcggataccgcgcaggtagccctggtgcagggcgtcggtgtcgatgtcgcaagcggtggggtcgtagatagccccgtggactttgtcacggcgcaggatcggcaagcgtgcacaggcttcatcgaccgtcaggcgctgcacctgcgccacggtggccttggcgctcaggtactggctgtcgagttcggccgggtcaccgttgaaatcaacggtcatttcgccccggggcgtcagcaggggatgttcgcagaagcctgcgggtggctggtcgaaaaaggcccggctggccaaggtcagcgcgcgtacctgcggggtgccgtacgctgcggtgtagagcgctgccgaacgcccggtggagtgataggccggatggttttcacgctcaagcaccaacactttgccgtgctgcgacaaccagaacccggtggacgcgccggcaatgccgccgccgataatgatgaaatctgcctggctcatgaagatctcctgaaataagcattgtaggagcgagcttgctcgcgaaaaacgttaacgataacgcgcccatcctgtgtaaacgcagtagctgtgaggtcttcgcgagcaagctcgctcctacagtcggtacagggcattggccagggcgatgtcttccaggcccaggccaatggagcggaaaaacacgtgacgatcgtagtccgggcgctgggccatgtcgctgaacaactcgggcaggtcgccgacaattgtgcgtttgtcccagccgtgctgttcgctggcgatcagcatctcaccggccgaatccggggtggtctggcggtagtcgcagaacacgtgcatctggttgaggcagtgcggcggcacttcatgggcgcgtggcgcgttggtgctgatggaggtgatcaacgcgggtttgctcaagcgtgacgggtcgatgaccgggccagcggacgaggtgcacagcaggatcacatccgcgtcttcaagggcggcctcgcaggtggcggcgagggtcaggcgcgggtccaggcaggccaactgcgcgcgtgtttcggcgctggcgctgtccaggctcggtgagtacaggcagatttgctgccagtcgcgtaggttctgcacataacgcaggtgcgcttgggcgaccttgccgctgccgataatcgccaaacgttgcgccgccgccggagccagcgcatccaccgccaaggccgtggtggcggcggtgcgtgcggtggtcaattcagcggcatcgcacaacagcaacggctggccgctgtgcatcgacatcaacagggtccaggccgtcaccaacgggccttgctcacgcacgatgtagggcgaagtcttgaccccgtacaccccgtcttcggccaatacccccaagtagttgatgaaatccccggcgccttggggaaactccacccactgttgcgccggctgcacggcttgcccggcggcgaggtcgcgaaacagtttgcgcagaaccaaaggcacgtcgacttgagccagcaaggtgcgggcctgggcctggtcgataacgaggggcgtcgtggacatggggttctccgggtaaactaatttgtccattatggacttttagtttttatccgcaataacccgaggaaaaaatgaggcttatgggcgctgtccccccacccatcgtaggagctagcttgctcgcgaaaaacgtcaacgataacgcgtgcttcctgaataaacgcagcgcctgtgagtttttcgcgagcaagctcgctcctacagttggaccgcgggatgtcaggtatatagatatcgactgtcatgccgttattgcagacaagtcagctcccacaggtaatcgatgatgttctggcggacgagttatcgcctgcccgagcgcgtgctcacatccacccacaccgccagcaccaaaatgctgcccttgacgatcatctgccagtagctgtccacatcgagcatcgacatgccgttgtccaggctggtaatcaccagcgcccccagcaacgcgccatacaccgtgcccgacccaccgcgcatcgaagtgccgccaataaagcacgcggcgatggcgtcgagttcgcccatgttgcccgccgacggcgaacccgccgccagcctcgcggtattgaccaggccggccagcgcgcacatcacgcccatgatgccgaagatccacagtttcaccgcttgcacattgatgcccgacagccgcgtggcctccatattgctgcccaccgcatacacccggcggccgaacacggtctggtgcgtgacatagctgaacacccccagcagcgccagcaacagcagcaccggcacggggatgccgtcgtagcggttgagggtggtgacaaagcctgcgagcaccgcgccaatcagcaccacgcgcagtgcatcgcgcagcagtgagtgcgccgccaagccatgcagcgcacggttgcgccgttgtttccaggtgaggaacagcgtcagggtaaacagcaatactccaagcccgataccgacgttgtggggcaaatacccctggcccacatacaccagcgacggcgacaccggcgcaatggtggtgccgccggtaatccccagcagaatcccgcgaaacgccaacatcccgcccaggcccacgatgaaggacgggatgcgcaggtaagcggtcatgtagccgttggccaagccgatcatcaagccgcacagcgccaccaggctcaggttggccaatagcggcacgtgatagaccacatccagaatcgctgccaacccgcccaacagcccgagcagtgagcccaccgacaagtcgatctcgccgctgataatcaccagcaccatgccgcacgccaatatcccggtgatcgacatctgccgcagcaggttggagaggttgcgcggggtgagaaagccgccctcggtctgccaactgaaaaacagccagatgaacgcgacggcgatcaccaacgcgagcattttgtagcgggtaaataggtgtttgacctgattcatctacgcggtcttccgattgttattgttttggctgagcgcggcggcgagcacctgttcctgggtaagcccttcgttgatgaaatcaccccgcaactggccgtcgccaatcaccagcacgcggttggacacgccgagcacttcggccaattccgaggacaccatgatgatcgacaccccttcggccgccagcgcgcccatcagtttgtagatctcatacttggcgcccacgtccacgccgcgcgtgggttcgtcgaggatcagcaccttgggcttggccatcagcattttcgccaacacggccttttgctggttgccgcctgagaggctggtgatcggcagcgacgggctggcggtcttgaggtgcatgcggctgatttgctggtcgatgctgcccagttcggcttcggcgttgatgcgggtcatgtgcgcgtaggtgtcgagcaccgccagggtgatgttctgccccacgcccaggtcggggatgatgccttggcgcttgcggtcttctgggaccatgcacagcccggcgcggatcgacttgagcggcgtgcgcgtgtcgatcacctggccatccagccacacctcggcgctgtagcggccggggtaagcgccaaacagcgccgacaccagctctgtgcgcccggcgcccaccaaaccggcgatgccgaggatttcgccgcgcctgagcacgaaggagatgtcgtcgacgcgcttgcgcttggggttgtcgacgtcgtagcaggtgacgttacgcgcctcgaagatcacctcgcccacgtcatggggctcggtggggtagaggttgctcatttcgcggccgaccatctgcgtgatgatctgcgggatgtccatgtctgccatggcggtggtcgcgatgtgcttgccgtcgcgaatcaccgcaatggtgtcgcacaccgccgccacttcatcgagcttgtgcgagatgtacacacaggctacgcccttggccttgaggccccggatgatgtccagcagcacctcgatttcgccacgggtgagggccgaggagggctcgtcgaggatcaacaggcgtgcctgtttgttcagggccttggcgatctccaccaactgctggtagccgccgccatactgcgacaccggcagcgccacattcatgtccggtaccttgagttcacgcatcaaggcttcggcgcggtgcagcatcgccgggtagttcatgcgcccaccgggcagggtcagttcgtggcccatgaaaatgttctcggccaccgacaggtcgggcaccagggtcagttcctggtgaatgatgacaatgccggcggcctcggtttcgcggatggactgggccttgagcggctgcccctcccagaggatttccccctcccaggtgccgtgcgggtacaccgccgacagcaccttcatcaaggtggatttacccgcaccgttctcaccgcacaggcccacacactccccaggtttgaccttgatatcgatgccgttgagggctttgacaccgccaaagcttttgacgatgccgttcatttgcagcaggtaatgcgacatggcaatggctcacacaaaaggccgacgaaacaccgtcactgtaggagcgagcttgctcgcgaaaaaacccaggcgacacgggctgcctgccagcacctacaggccgatctgctctttggtatagaagccgtctttctccaacacatcgatgttggctttggtcaacggcgtcggcgtgagcaagatggtgtcgacctgcttgctgccattgtcatattgcgagctataggtaggcttttcactgcgcgccagttgtaccgaaagcttggccgcttcggtggcgatcagcttgagtggcttgtacacggtcatggtctgggtgccgtcgatcacgcgcttgatcgccgccaggtcagcgtcctggccggagatcggcaccttgcccgccagcttctgcgcagccagggcctggatcgcaccgccggcggtggcgtcgttagaggcgacaattgcgtcgatcttgttgtcgttacgggtcagggcgttttcgacgatgctcaaggcttcggtggggttccattccttgacccattgctggccgacgatcttgatatcgcccttgtcgatggccggttgcagcaccttcatctgaccttcgcgcagcaccttggcgttgttgtccgtcggcgcgccgcccagcaggaagtaattgcccttgggcgccgcttgcaacacgccgctggcctgcatctcgccgactttttcgttatcgaaagaaatgtaggcgtcgatgtcggcattgaggatcaggcgatcataggacaccaccttgatcccggccttcttggcttcggccaccgcgttggtcagcaccgtggcgttgaacggcacgatcacgatcacatcgacgccccgggagatgaggttttcgatctgggcaatctgcttttgctcgttggcatcggcagactgcacgaacaccttggcgtcgagcttttccgcggcggcgacaaagtaatcacggtcgcgggaccagcgctccaggcgcaggtcgtcgatggaaaaaccgattttcgggtgtgcaggatcggccattaccggcagggcgagcagcgccagggctgcggcgagcagggcaggtttgaatgacttcatggtggtgcgtccttttattgttgttggaaagacacagcgtggtgcgggttgaactgtagagcgtcactcgacgctctgtgcagagatttgtcgtgcaaatgtcaccgatagataaaccgattcacaacgccctcaagcatctcctggcgcccactcaccgcctgtgggtccagcgcgttggcaaaggcatgttcagccaatgattccaggctgaactccccagccaacaccgcctggcccaatggctggctccagccggcataccgctggtccttgaactgctgcaagtggtcgtcttgcaccatcgccgccgcacgctccaacgccagggccagcacatccatggcggcgacatgcccgtggaacaggtccacctcgtccaggctctggcggcgcaccttggaatcgaagttatagccgccgttcttgaacccgccggccttgaggatttcataggtggccagggtcatctcctcgacgctattggggaactggtcggtgtcccaaccgttctgcgggtcgccccggttggcgtcgatgctgccgaagatccccaacgacacggcggtggcgatctcatgatgaaaactgtgcccggccagcgtcgcgtggttggcctcgatgttcactttgatctcgtgttccaggccgtactcatgcaggaagccgaacacggtggcgctgtcgtaatcgtattggtgtttggtcggctcctggggcttgggctcgatcaacaggtcacccttgaagccgatcttgtgcttgtgttccaccaccatgcgcataaaacgcccgagctgttcgcgctcgcgcttgaggtcagtgttgagcaaggtttcatacccttcacggccaccccacagcacgtagttggcgcccttgagccgcagcgtggcattcatcgcgctgaacacctgggcggcggcgaaggcgaacacctctgggtccgggttgctcgcggccccggcggcaaagcgcgggttactgaagcaattggcagtgccccatagcagcttgatgccggtctgttcctgatggcgctccaggtggtcgaccatctgcgcaaagtggttgcggtactccttgagcgagctgccttcgggcgccacatcggtgtcgtgaaagctgtagtagtcgatgcccagcttggaaaaaaactcaaacgccgcctcggccttgccgatggccacctccatcggatcgccactgcgctgccacggacgtttgaacgtccccatcccaaacatatccgcccccggccacacaaaggtatgccagtaacaggccgccatgcgcaggtgctcccgcatgggcttgccgaggatcagtttgttggcgtcgtagtgacgaaaagcgagggcagaggtgctggcagggccttcgaagcgcaccttctcgacaccggggaagtacggcatggggttttccttattgttctgggcggtgtctggatactagcaatggcgcctgggcggctgattatgaaaatcaccaaaggggagtgcgattttgagtgaggggctgagaacggctgagggagtacaggatttacggaaacgtctgactttacggtggggaagtgcctcttcaaggtttggtgtgccactgacttgctcctgctcgtttacctcggaaggcgttacgcgtcagttttcttatcgagacgagcagggaggtacggccaaaaaacatggataagaggcaaaaaaatgagcgtaggtcatttcattggactgggtgacaagaccacctgcggcggggaagtgctggacggtgataagagagtcaacatacatggcctttttcatgcgtgcgaaggtgaccgagtcacctgtggcaaggatgggcaaacttataagatcgtcggtggcatttcccacataaacagccatggccggcttatggccggcactttggatagttacagcgactgtccctgtaaagccgagctgattccttcggtgtactcagccacctatgaaaaccaacatgcagaaccgcccattaacctgcgagtagctcaaccaaacgcatcatctgtaaatcgaaacactgtagcgccacgtcattctggtttcgtgccgtccggtcatgttggatcaatggcatccaatggtgtgcaaggtcaggagccaggtttttatatcgtgcccaaaagcatgacccgcgaggcgctggaagccacactttttccgacgctcgacccggctgtgatgcgcaagtttcaagcactgaacccgaatacgaatcacgtcaaagccggttcgatgatcgtgctcagcgatccgaacaacacctcctgcacgtatcaagaagcgcagctgatgcaggctgcacaacacgtcagtgcatctctggattcgctgacgccggacgaggctgactttctctatcgccacggtgccgagatcgctggctttatcggccatacctccacctggctcggcgtcagcgcagtggtgatggaaaagcacttgagcaacctgcgcgagacgctccaggccatggaacgcctgcatcaggacagctatcggcagcacgggcaccttcggtcaccgcagttttttgctgatcgccagcggttgatgaaccagttggatgctcatctgctcaactccacccgcctgcgaggacaaacaacgctgggcgatcaccccaagttgaaaacggcccttggaatttccagtcgcagcttggtgcatcactgggacaaggcgggtgggccggggcagattccggggtacgccgcgcatgtggaagcggtcagccgtgccacgaagtatatgaaggcaggtggttatatcggtataggccttggcggtgtgtcttcgttgttggctatacagcaggtgtgtaacgggaattctggtgctgcgtgtgagaaggttaaatttactgaaggagggaaattcgctgggtctactgctataggtgttgcaagcggattggcagcgagctatgccagtactgcggtgtgcgtagcgctaggcgtcacaacagggatcggtggtgttatctgtgtcgctgctgttgtaggcactggcgcctgggtgggtacgacgtacggtggtaaaacgggtgagtacataggtgaaaaaatttacgaggccaggcaaccatgaccagtattgacacttggcctccctggatcgcaatcaccgttacagggggcccgattttacttgccgctgctggcattatttttagtctttaccttagccgtcgatacttggacgctataaaggatgcgctaaaaaacagtcgttttatttatatctggggaacaagcctgggaaagaggggggtaatctggtcgcttctggaaatatcaaaaattgccggaatggtgacgttgccgaaggcgtctattcgcatcggagaactggacccaggcgatcttgaaaatttcccccctcatctaaaacgtctgttgaccatcaatatgatgatgttgatcggttccgtcttttgggcagcagttgcagccatattggtggaatttaggtaagttgagcgggcctcatccgaggcccgctatcctgatcagtcaaacctctgcgtactcatctgcaccgaccggccccaggacaaaaacaatgaaaaccctaccgcccgttcaccgcatcgccttgctcttcaacggcagcaaaatctacgaccgtggcatcatcgccggtattggcaactacctgagcagcacccgtgcgtcctgggatctgttcctggaagaagacttcctctgccgcctgcgcggtatcgagcgttggcagggcgatgggatcattgctgacttcgatgacccgctgatcggcgaggcgctggctgggagtcggataccggtggtggcggtgggtggctcttatgaggatgtgggcaagtaccccaagggcattccctatgtggccaccgataaccatgccctgatgaagctggcctacgagcatctggtggaggcggggttgacgcggtttgcctgtttcagcctgcccgaagcccaggccaatcggtgggctcaggagcgtgagaaagcttttcgccgcttgatgcagcgcgatggcttgcaggtggaggtgtatcgcggactgggcaccagtgcgccgttgtgggacagcgcggtggagcagcagattgcctggctgcacagcctgcccaagcctatcggcattatcgcggtgaccgatgcccgcgcccggcaattgctgcaagcctgcctgacggcgggcattgcggtgcctgaggaggtggcgttgatcggcatcgacaacgacccgctgacccgcaccctcacgcgggtgccgctcagctcggtgatccagggcacggagaccatgggccgcaccgctgcggcgctgttgcatcagatgctgcacggcaaaccctgcacgggcacgcaggtgctggtgccgccggacgccatcaacgtgcaagcctccagcctgcatcaacccctgggcaacccttacgtgatgcaggccttgttgtttatccgccagtacgcctgccagggcatcaagaccgatcaagtcgcggcttatgtcggtgtttcccgctcgtccctggaagcgcattttcgcaaagcccgcggctgcagcgtgcatgatgagattttgcgcttcaaactcgctgccgccgccaagggcctggaaaacaacagccttgctatcgccgacattgccgcacgctgcggcttcacctctgcgcagtacctgcatacggtgtttcgccgcgaatttggctgtacgccgcgtcagtatcagcagggcaggccagctgtaaggcctgctgcatactcgccagcttgatctgggtttcctcgtattcattggccggcagcgagccctcgacaatgccgcagccggcgaaggcgtggcaatgccttggggtgatcagcgctgaccgcagggccacgaggaagtcgccattgccctgggcgtccagccagcccaccggcgccgcgtaccagccacgatcaaaaccttcatggtcgcggatgaacgccagagccgatgccttgggcaggccgccaacggcgggcgtgggatgcagggcctggataccgtccagcaggcgcttgcccacgttgagtcgggcgctgatcggcgtgctcaagtgctgcacggtggccagtttgagcaggctggggctggatgcggcctgcaggtcgctgaccttgtcatgcagcgcctgggtgatggtctgcaccaccagttgatgctcatgctgctccttcggatcggccaataggcgttcccccagcgcttggtcctcattcggcttgagcccacggcgggtgctgcctgccagggcgtgggtgctcaggtggcccgacgcgcagctgagcaaacgctcgggggtggcgcccatgaagcaatggtcgccacggtggatcgcgaacaggtgcgaggcgttacggcgtgcgtacaggcggcccatcaccgcgccggtgtcgagggccgcgtccaggcggtggtcgatatgtcgcgccagcaccactttgttcaattcaccctggacgatggcgtccagtgcggtctcgaccttggcctgccattgatattggggcaaggcgctacggcccagcaccgtgggtgtggctgccgggttgtgggtggggttgagcagatgttcataggcggccaggctttgctgggccagtgcggcggggtcgctgcccggctcgatcacgcgctggcaacgcagccagcgcccgctggcgtcctcgctgagcaaccagtgggcgaggtgaaaactggcgtcggcaaagggcgcccaatggggggcgctgggtcgctggtcatcgaagcgcatgccccccagcagcaagggcgcatgtggcccttgtacaagcgcatcggcgcacagtgcgaaccattggcgatccacctcggccatgcgttgggacccggtggcttcgatctgccaagtgcagcccaggccgaacaggctcaggtcgggcgaatgcgcgcaccagaagaaaccttgccgatgggcttgataaagcgccaagggcgcaagcgtcggcgcggcgcatgcgctgacggcaatcaccggccgttggtacgccaccgctcgttggtgcgcggcctggaacactttgagcaaatcgtccgcgttcatacggccttgctctttttctgcagccagaaggcggtctgctcggcgatgtaccaatggatgatctggttgaacaggctttcgataaactccccatccagcccgacgtcctgcgcccattgccgacgcagcggtagcatcgccgcgacgcgctccggggcggcgatgctggcttggtcgggtttgaatgcagaggcggccttgacgtactgcatgcgcaggccaagggcgtcgatgatctgatggtcgaggttgtcgatggcgtggcgaatatcagcaaggccagtgcagtgttccggggttttcatcatgtgtctccctgaaggtaggcggtgcgttgcgataggtggtcgatcaccggtcgcggctgatgcttgaggtaaaaatggtcgccgtcgaacaggcggatatccgggagatggccgctcaggtcggcccaggcgcgggcctgttccaggctgacttcggcgtcatcgcgggccagcagcacatccagcggcgccgccaggggcggcaggtgtgcagggcgccaggtttcgatggcctggtaatcgctgcgcagcgcgggcaagaacaccgcacgcaaatgcgggttggcccacaggccggcggcctgggcatcctggcgcaggatgtcggcgatcagtgcactgtcgtcctggcggtgcaggtcgctgggcggttgccggtggggcggcgcatgggccgagacaaacacatgagccgggccggcagcggccgcttccaggtgtacgcccacggcataggccagcgccgcgcccatgctgtggccaaacagcagcaggggccgcgcaggcaaggccagcaacgcctggctgatgtgctcggcgagagtctccaggcacggcacatgcgcctcgttgaagcgctcttcacggccggggtattgcaccgccagcaggtcgatatcccctggcaggtgcgccagccacggccggtagaagctcgcactgccaccggcgtggggcaggcacacccagcgtacgcggggctgtgggctctcccgtaaaacgcgcagccaccggctcatgatgccaacacctgttccgctagggccttgcggttgaccttgcccaggcgtgtcagcggaaattcgcgtagcacctgcaagcggtccggcaacttgtaggcggccaaccctcgttcgcgcagccaggcgttgatcgaagccaggtcaattggttcgtcgcgggccagcacgcaagcgcaactacgctcacccagcaactcatcggccagggccaccagcgccacatcgcgaatcagcgggtggcccagcagcaggttctcgatctcttccacggggatcttctcaccgccgcggttgatcacatccttgctgcgtccttcgacaaccagatgcccttcgggcaggcgccgtaccaggtcgccgctgcgataaaagccatcggctgtaaacgcccgctggttgtgctcggcggcgttgtagtagccccgaatggtgtaggggccacgcgccagcagttcccccacggcgccaggcgcgaccgctacatcatcggcatcgacgatacggatctcatcggcagcggtcagtggtaggccctgggtttcgaagaccagcgcctgcgggtcatccaaccgggtaaaacacagcaagccctccgccatgccgtacacctgttgcaggccacagcccagggcggggccgatgcgtgcggcgatctcggccttgaggcgcgcgccgccgacttgcagccattgcaagctgctgaggtcgttgtcggaccattgcgccacttccagccacagcaacaccaggggcgggatcaacgccgtgtgggtgatgcgttcgcgttcaatcagttcgaaggcggtgtccgggctcggctccggcgccagcaccaaggtggccccgacactgaacacgccgagtgcgcccggggaggccaagggaaagttatgcgccaccggcagcgccgccaggtaacgggtgtggtcgtcgaagccacaggcgcgagccgccagccgggcgttgcaggcgtagtcgtcatgggtacgcgggatcagcttgggcaggccggtggtaccgcccgacaacagcagtaccgcgacgtcccgagcgtctggcgcgggaaactcgcggggggtggcgacgcaatcggccagggccacgaactcctcggccgcgcccaccacccacacctgttgcaggctcggcacctgttcaaccagggtgcgcgccagtggccggtaatcgaagcccaggtgctgatcgacaatcacataggccaccgcctggctcagatgggccaggtgggccaattcgtgctcgcgatgggccggtagcgcaaacaccgggatcactcccaggcgcagcagggcgaaggtcaggctgaagaactcagcgatattgggcagttgcaccagcacccgctggccggcaaccagcccgcgctcggcgaggccggcggccaggcggtcggcgtgttggtccagttcggcgtagcgccagcgtcggttgccgtcgaccaaagcttcacgttgtggtgtgcgctgggcttgctcgcgcagcagttggcccaggggcacgccttgccagtagccttgctcgcggtagcggcggataaagtcttcgggccagtcagtgcatccatcaagcatggcaatctccttgggtggtcgggcagccgagcaattgggcgccgtgcagggtcagcggttgcgccaggccggcgatctgcaccgcctggacgccggtgtgggtggccggttgcaggtgcaacatagggtcgtcgccggcaagcaggtttagggctgtatggtcggcggggctcacgccaaggtgaatggccgccaggccagtggcaccgttgggatggatcagccgcgccggatgctgcgtgggcgtgtagggcgtcaccagaaagggcaggcgctcgtggcgcggatagacaaaacgaaagcgcgtctggctgccgtctgcacaggtgcgttgccagttcaccacgcggcccatggccacgccgctggccgccaggcccttcaggcgcggcgccagggccgcgtcatcgcacagcaatgccaggtcgcagaagccttcgccgtgggcggcccagcgcaacatgcgccgtccggcaccacgcccggccaggcagtcgatgggccacttcaacagccaggcgtggcgcggcgtggtgagcaactcaatgatcggcccgtggctgaaccaaatatgcgcgtgctgggcgcgcgcctcggcggtggcgtaggtgacctcgaacccggcggcgcgaaaactcgccacggcctggtgcaggtcgcgcacccacagcaatacatggctgcaggaggaacgggactgggcagtattcaaaagggcagggctcccaagagttgagcgctggggtcagcgtcagggggttgcatggcatcggcgcggcggtgcaactcggccagcggcaatgcctggggaacaggtggcgcaatcaattcgggcatgccgatcaggctgttcatttcgcgccaggccatcgacacctcggtggcccacacgccgctgcgcaggcgtcgcgcgggggtttcgatgtcggcgcacaacgcgtccagggcgaggcagaccgcatccggccacacttggttgaacacctggtgatagctggcaggtatctgcgggtcgagcaccaccatggtcggcccggccagtcgttcgctgccggggcctgccatgatcaggcggtcggtgttgtcccgtgacgcatgcaggcgcgggttccacagcaccgggccgtgggtatcgcagaggctcagtacgccggcttcacagcctacttccaggcgatgcatcaaaaacgaatggttgtccgggtcctggggatgcacttggttctgcacgcgcaggctgatgggcacgccattgaaactggcgctcaacggcgtgaaggggtgagcgccgacgctggcggcgggggctgcaaatgcccaaggccgcaggccaccggccaggcgcccgagaatgtcgagcagggggtaggccacctggctgttacaggccgcgtcgatataggccagtccgtgttgctcgcgcaggtagtcggccaccgcgagaaagcgccggatcgcgaggatattggggtacagcgtattcaccgcgtaggccgcctggccgtggcgcgccgcccgcatgcacgcggcaatttcgcggtgatgcaccgggtgttcctgcaacacgtgaatgccacggcgcagcaactgctgggccagttcgctgccggcgccaccggtggcgccggagcgcaccaccacacaggcgatatcgacgctgtccggcacctgctccacggcctcgtacagtggcacgccgtagtggtcggcgcaggcctgggagtaggcattgccgcgcgacaggatccccaccagctcataacgctcatgggctcgggccagggcttgcaggtagatgcggccaaacgcggtgcctgcgacgatcacgcgttgacgtgggcggctcatgaccaggtcaccggcaggcagtgggcaccgcgaaaaaaggtcgcggttttccactgtaccgccccgcagcgtttcaagctgggcaggcgttgcaccagcgcctgcaacgcctcctgcaactccacccgcgccagcgccgcgccgatgcaatgatgcaggccgtggccgaagccgaaatggccctgggcgtcgcgttgcaggtccagggcctgtgggttggcaaagcgcgccgggtcatggttggccgcgccgattgaagcgaagaccgcctcgccttggcgcaccagggtttcacccacctgaatgtcttgcagggcgtaatgcacaaacatcgccgccgaggccagtgggatatagcgcaaaagctcttccaccgcctgggggatgtgctcggggtgggccttgagttgttgccattgctgcgggttgtccagcagcaccaggatgaagttgggaatctgcgacgcgctgccttcgtagccggcgaccaggatggcgatgcacaacagcagcagttgttcttcgctcaggcactcgccttgttcgtcggcctgggccagggcggtcatgaaatcgtcctgggggtggcggcggcgctcggcgaccaggcccttgatatacgccgcgagttcgcccaagtgctgttgcgtcagggccgcgtcttcggggcgggtcgacaacaacgagtcgttccactgtttgaagcgttcgcgatcgtgcagcggtacgcccagcaattggcaaatcaacgccaggggcagcggcaaggcaaagtcattgaccaggtcggcgggcgggccggcggcgagcatgcggtcgatcaactggtgtgcgtaggcccgtgcatggggccgcaaggcttcgacgcggcgccgggtaaacgcctgggcagcccgggagcgaatgcgggtcagctgcggcgggtccatcatcacaatgccaccggcgatgcgtgggaacgcccgcggtgcatcgtcacggcgaaacgcttcgctgcggctgaaacgccggtcgcccagcaccaggcgcacatcgtcatagcgggtggcgagccaggcgggcgcgccaatgggcatctggattcgcagcaggcctggcgcttgctgggcatggcgataaggctcagccagtgccaggtcggtgaaggcgttgaaggggtaggccagcggggtcatggcaggtccttggcagtagacaggtcgggcaaacggtcgagcagttcaaactgcaggtcagggtgttccaggtgggccgccagcgcggcacggctcaggcgttgctcgggcacttgggcgacgaagacgcgatggcccaggcgcgccaacgggtggtgggcggcgggcaggctgcgattgccctggaagccggcacgggccagggcgctttgccactggttgaggtccaggaaggtgctgctgctgagtgcgcgttcatcgctggcctggttgagcatgaaggcctgggacgccatcacccagaattcctcctgggtcggctcgctgaacaccagccagccgcccggcttgagcaaggtcagtaggatggccagggagcgctcggtgtcgcggggggcattgagtacgccgcccgcaacaatcaagtcccagtcctgggtgtgataaccctgggccagggcagggcggtcgatatcgaacacgccgtggcgcacccatggccaggcgtgcaggcgctcggcggcctgttcgctgaagtagcgcgacacgtcggtgcacaggtagtccacggcggtattcgccaaggccggcaacaccgcctgggtggtggaaccggtgcccgcgccgacctccagcacccgcaacggcgcatcggtgggttgacgcgttgcccaggcacccacccaatgcgccacgctgcgatgctggtattgcgccgccaggctttcgcggtacagcgccgctgcgcgatcggtgcggccttggggaaacagcaggtgcacggcggcgcactcgccgcgcatcagcgctggcaactggcgagcattgtcccgtgcatagtcgagggtggcgctgccgccggtgttgtccgcccagtccaggctcaactgtgcccagaggtcttccagggtggcggtgctccaggcgctggcgtcgaggctggggtagaggtggtcgcccttgcgctgcagcagttgctgggcttgcaacacgtccagccagcgtgcgatcaagggccggtggccaggcgcgatgccggcgttggccaggctttgggccacatcgttgagcggtgccggcagcaagccgcattgctccaggccgttaagcatcgacagcaaggccgcgtggctcaagcgttggttcaactgcacggcctggttcaattgcgtgacgctgaactgctgattgacagctgcctcggttgcgtcgagatgatcatccaccgcagtcgcttcacaacgctggggcacggcgagcaaggtctggccatgcagcgcaactgcacgcacctgagggtgccccaaggcccgctcacaccagcgctgttgctcacgcttgagctcggccaggtcgcgtccatcttcggtgaaaccctgcacgtggcaatccagttgggctgcggcgcgttcggccagttgccagtcgccggggcgttcgctgacgaacagcacctgctccagatggctcagatcactcaaggccagggcgggaaagtccagcaggcgctccaactgctcggcgctcatcaccaccaccgccgggcgctggcgttcaagcaccgccagcaaacgtgccggtgcctgttgatgcacgcccaggttggtcaaggttggcagacgccacggatgcgctccggcgggcaggtcgatgagcaaggtatcgacattcatcctcaaactcctatggcatgaaacaagcgttgccccgccgcggcgagcgggtcgcacgcgctgggccatacctccagcagctcaaaacctgcggcctgcaaggccaggtcccaggcatcggcggccatgaaggcttcatcgtgtgggcgcaacggcgcatcggcggcgggcgacagcagcaagtgcatgaaggtcagcatcgccgggttgtcggcgatggactcgctgaacagcaaggcaccgccgtcgcgcaggctgctgcggatctgaccaaggctgtagggcaggtcgcgggcgttgtgcagcacgttgccagcgactaccaagtcctggctgccgggcactatgccctggccgctgaagctgcgattgaggtcgagcaggccgacctgcatgcccggctcgaggcgaaactggcggtgcgcggcgccggtaaacagcgagctgatgtcggtgaagcgatagtccttttcgtacgcttgcaacgccgccagcattgcgtcggtggtgcctccggcgccaccacccagttccagcaccctaagctgcccgtcagtggcgctgatttgccgcgcgcgatcagccagggcttgattgatcgttgtggtgaagtggttgtgctggtaggcgctcaatacctttaccgggtcgcctccgagcatcagcaagtgggtgagggtgaactgatcacgcagcaggtcgggcaggcactcgatgacttgggtgtgcaggcgcgccatgctggcgggaaagcccagcgcgccatacaggcgtggcaattcaccgagctgcgggtcaggtggcggcgtgcgccaggccacccgttcaccggcttcgcgcagcaggcccgcaccgcccaacgccaccagccaacgccgtaccacccaggcatggcgcgccgctgtgcccagcgcctggttgatttgttcggcgttgcgccatacctgtagcggcaatgcttgggtgtgcagcaacacctgggccatcacgcccaggctcagctgttccagctcgttcaacgccgtgttcataggcaaccttcgtcggcggtatgcagttgatcgagcgggctgtgcagcaggttcagggcctgaatcgccgaggtgcgcagcaggcgttcaaggctggcggcgggcggcaggacctgggcggcggcatggcagccggcgcggatttcaccttccaccacgctgatgaccgtggccgctgccatggcggcggtcagcgctgcattgcccgcgccgctgaacaccaggctgcgggtcagggcctggtcgtggtgcattccatcgagctgcagcagtagggtgacgaagggcgcctggccgctgaggtcgagctggctggcttcgcacaaacgctgcacggcgtcggcccgtggcaaaccatgggcctggtccagagccttgaggacgtggctgtcggtgatcacgttgaaccactggccgacgtccaggttgaggtccatggccaggcgttcgccctcaaggttgaggtacggcagcaggtgaacccgaccgggaaagcagggcactgatacgtcgcgttgacgccgcaatgcccggctacgccggccgtgttcccaggctgccaacggctcgctgctgccatccactgcgccttgcaaaaagtcatcggcggccacaggggtgaagtggtcgcgcaaaccgaaatagctggtgaggcggtgcacttggctaaacccttgctcggccagccagcgcggcagcaggccggtaagccccggttgcaagccggcgcccagcaccgcgcaacggccacgccactgggccgggtcgagttgcacaggatcggcggcatcgacgtaatgggcatcgacccgcagcgctgcgtgggcggcacggccttgcaactgccaggatgggcccgcgcagttgagcagcacgtcgcagccatgggcgaaggcagccaaagctgttgcgtcgttgaagtccactgaggcccactgcaggcgcgtgtgtggccattgctgctgaagcaaatgcatgcagtgtgcgcccttgacggcatcgcgcccgcccaggcgcaggtcgctcacccccagggtcaacagcgcctgggcactggccaggcccacgtcgccactggcgcccaacaccccgatcagcatggttgggcctcggcgttcaagcgccagccaccggcacgctggcggtcatgccagaacccggcgtagcgaccgccccgagccagtaattgggcatgggtgccagactccacgaggcagccttcatccagcaccaggatctggtcggcggccatgatggtcggcaggcgatgggcgatcaccagcaccgtggcgctttgcatcaggctgccaatggccgcttgcacgaaggcttcgttgtgcgggtcgagggccgccgtggcttcatccagcagcacgatgggtgcgcgcttgagcaaggcgcgggccagggacacgcgctggcgttcgccgccggataaccccgcaccgccttcccccacaggggtgttccaaccctggggcaagcgcgcgacgatttcatcgacgccggccagccgcgccgcttcggcgacttgttcggcgctggcgtcggggccgccgacgcggatgttggcctcaaggctgtcgtcgaacaggtagacgtcctgcatcaccagggatagctgggccatcagcgctgcgttggacagctcacgcacgtccacgccacccaccttgacgctgccctcgctggcatcgaaaaaacgcatcagcaaacgcgtgacggtggtcttgccggagcccgaggcgccgacgattgcggtcatcgtgtgggccggggcgttgaacgacaggcggtgcaataccctgggcccgctggggtaagcgaaactgacctggtcgaaggccaggctgccaggcgccgtcaagggctggctgacggcgggctctggcaacggcggctcgcgcaggatactcaccagttgttccaagtcgttgcccgccatacgcaacaggccgctgcgcgccgccgcttcggccaatggcccgacaaaccgcgccgccagcgcgagcagggcgaccaactggatggcgtcgatttcgccgtggctggccagggcgatgcccacgcccaccagcagcgcaaacgccagttgcaccgtcaagccaccggccagcagtttcgggaaggtctgggacagcatcgagccgccggcgtgtttctgcgccaggttggcagcctgcaaaggtgcgtacccctcctgggtgcgaccgaaagcgcgcagcacttgctggtagcgagcaaactccacaacgcggttacccgccagcgtcgcggcggcctctacctgcgcatcgttgctgccgatggcggccgcagaccagtgatgggcaaagtagatcagcggcgcgcacagtaccgcggtcacgcccaggcgccagtcaaacacgaacagggtcaacgccaccgtagccggcaccaccacacctgacaccactggccccaggtagtgagcaaacaagccggtgaccatcagcgtgccgctggtggcgctgcgcgacaggcgcccgaccttttccgagttgaaccagcccaggggcagggtcaccaggtgctggccaagacgctcgtgcaaggtggtcaacaccactagggccagcgcaaagcctttcatggcctgctggtaatgggcaatgcaggtcagcaccgccatcgccgccaggccggcgagccacaggcaggcactgcgcaggtcaccggcaaacagcgcatgcagcatcggtaccagaaacgcgacggctaccccttgcagcacggcactggtcaccagccaggccaggtagcggtacaagcgtgcggcatgggccgggcccagtaaagtcacgaggctgcggatcacaaggacatctccaggtcgggggcggtggtttcggcgctggcgcgccacagtcgggcgtaggcaccgttggcctgcagcagctgttcatggcgcccgctttcaatgacgcgaccctggtcgagcaccacgatctggtcgacgccgcagatactggccaggcggtgtgcgatcatcagcaccgtgcggccccgagctagggcggacaaggcatcctggatcaaggcttcggactcggggtcggcgtgggaggtggcttcatcgaggatcagcaccggcgtgtcggccaataacgtgcgggcgatggacaggcgctgggcctcgccgccggaaaaaatcgcgtcctcgtcgatcaccgactggtaaccccggggcagtgcctggatgcgcgaatgaatctgcgccgaccgcgctgccgcctcgacctcggcatcgctggcttcggggcggcccaggcgcaggttgtcggcgacggtaccgtgcaccagttgcgcgtcctgcaacacgaaccctacgtgctgatagagctggcgcgggtcgatctcgcgcacatccacaccgcccacgcagactcgcccggtgttcacgtcgtgaaaacgcggcaccagcttggccagggttgacttgcccgcaccggaagcccccaccagcgccgtcacgctgccggctgggcagtgcaggtcgacgcccgtgaggatcaggtgcgcggggtcatagccgaactgcacttgttcaaagcgtatgtcgctgccctgtggggagctgcacaccttgggcgagggcagttcttcgacctccagcagcgcttcgatacggtcggccgccgccagggcggttcgttgcgcggtgaggctttggttgatcaccagcagtgactgcgggatcaccaccgccaccagagtttcggcgaacagttgcaacggtgtgatccagccctgggccagcaacacgctgcccacccccaggctgaccagcagaatcactggcacgctcagggccatcgacgaaaacgcctccaggcgcagcagcggcttgacccaaccggcgtactgggtgctgaactgattgaccgcctgttgatagctgcgatgggcctgacccacctggccgaacgccttgaccacggcaatgccgtggacaaactcgacaattgctgcgctgacccgggtcatgctcttgtcgagcaactgcatcttggcgccgaagccgcgcatcatcaggctgtaggccaccgcatagatcggcagggtcagcaccgccagcagcgccaggcgccagttcaacgtggccagccataccagccccgccagcggcgtgacaagggcggcggtgagttctaccgcatggtgggcgaccaggtggtgcagatcttcaaggtcgtcctgcaccaccttgcgcaccgcgcccgaggtggtgtcggtgtaccaccccaatggcacccggccgagcttgcgcaccatggcttcgcgcaagctcgattgcaggcgatggtcggccaggtgggtcagccacaacgccacgccgctggccatccaacccaggctcagggcgatgactaccagggccgcccaccgccacagcgtggggctgtcggcgttgccggcgagcagcaagcggcccagttcggtaaggccgataaagggcaccaggttgaccagcgcgccgatcgcggcgaacaccacgccgaggcgaatcaggcggttgaccgggcgtttgagggtatccagggcggtggtcatgagtgttttccaagggcctcaagcaggtgggcagtgacggtgtgcacgtggggtggttcgatcacgctgaaatggttgccgggcacgtcgatcagggtgaattgacccaggcacgcgtcctcccagaacggcgccgccaggtgcccgacgccgccggtgatgccgaacgattgctgctccaggcagcgcaggtaggtcatgttgcccaggaacggcggcgggtcgaaccgcgccgcccgcatgctgtggcggcacacgcgaaacagcgtgggtaccagctcggggccgatgggcacgccggcctggccagacgccaggcgtgcgtactcggccaggcgctcctcctggctgcgtgccgactgttgctgcaccgccagcgccaaggcgtccaggccggggtcgccgctcagggcggccatggcgccagcgggtacgcggcggttgtcgcgggccatcagcaggtcgatggcgcggtacacgtcgtagtcttcgatatgcgccccgaacacggttttcaccgggtccaggttgaggttgggcacgaagatcgcctcataggccagctcttcgtcggtgtcgataaacatcgggatgctgtcgatcaggctcaggtctaccacctccatgccacgttccagcaggcgccgggcaacttcggtggcgagcaggccgcccaggcagtagccgatcaactggaagcgttgatggccgtcggcgatcaagcggtcggcgtagtcctgggccacgctttcgatcaggcgcttgggttccagcgccaggtattgcgcggtgtcggccaccgcaaagccaatcaccgggccggcctgttgagccgccagtgcacgacccaggtgctggaaataatccaacgtgcccagggcggcatggaacatcacgcgcaccgggccgctctcgccaccgccgaatggcactaccagggcgttactgtgaggcgcgcgctgcgcttggtcaggcgccgcagcggcaggtgcgttttcgccgtggttgagcaggcgcgccagggcgcgaacattcggctcgttgagcatctggcgcagcaaggtgtcgtagctcaggctgtgggcctggggcagttgttcgcgcaactggccggcgacgcgggcgaggatcagcgaatcggcgcctttctcatagaagctgtcgtccgcaccgatctgcgccaagcccagggcctcggcccacacccggcacagctcggcggtgagcgggtcgctgggtgcatcctggctgctttcggcctgggcatccacggcagggcgccagtgggcgagggcctggcggtcgaccttgccgttggcggtcaggggcaggcggtcgagcacttgcaggtgtgccggcaacatgtagtccggcaggcgctgcgccaaggcgctgcgcaggttatcgacgctcaagcgctggaagccggccttcaagcgtgcggcgaacacctgcatgccgagagcggccagcgggtggtcggcgtggggcagggcgggcagcatttcgccgcccagtgcctgcacccgcgcctgccaggtctcggcgctgcgcaagccgctgcggccctgctcgtggtcaccgcccgccggggtcatcatgaagccctgggtcagcaggatggcgggccactcaccggtcggttcgctgaacaccagccagccacctgggctgagcaattcgctgatctggccgagggcggtgtcgatgtccttgacgctgttgagcatgcccgcgcacagcacgatatccacgctgttgctggccaaaccctgggggcgaatggcctggtcaatgtccagcacgccgtaacgcacccaggggtggtcggcaaagcgttgcttggccgccggcaggaagaaggcggtcatgtcggtgaacaggtaatccacttccaggccatcaagcaggctgatcaccggggcgctggtggccccggtgcccgcgccgatctccaggatgcgcagcgggccgtcgccctcatggtgggtggccaggcggttgatcagcgcggcgatgctgtggttgttgtagcgcgatacggcatccccgccatacagctgcaacgccaggtcttgctggccctgggggaacaacaggtcgaacgggttgacctcgccacgcagcagttgcggcagttgccgcacatggtcgagctggtagtcgagcagcgcctggctgcacaacccactcgcgaccgcttgttccacccggccccaggccagcgccggggcgggcccgctgtgcagcaggcgatagcgggactgttcgctttgcaacaggccggcgtcacacaaggccgctaaccagcggcgtaccagccaataatgacggggttgggcttgcagggcccgcaggatggccgccgcctccggctcggccaacgcaccactaaatagctgggccttgcgcatcacctccagcatggaactcaatgccgcggcgttgaggttggcctgatagtcgcgtacctgctgcgcatcgaagctgccgacctggctgtcggcgtaacgctgcactgcgctcagcaacggcgcgcccggcagcggttcgggctcgacgcgcgcggcggtgacgaaggccagcagctcgccgttgagcaggctgacggcactgtctacgcctggcgtggcgagcagcgcggcgtcgatttcgccaagctccacacgatggccacggatcttgacctggccgtcttcacggccgaggaactccagctccccccgcggcaagtagcggccacggtcaccggtgcgatacaggcgctggccgtcgagcgggtgggcgaaaaaacgggcgttgctcaatgctggatcgcccaggtaaccctgggccaggccgacgccggtgatgtacagatcacccggcacccaggtgggcgcatcgcgccattggctgtccagcacgcgaagaccctggttggccagcggcaggccgtagggaatgctgcgccacgccgggtcaatcgcgccgatggggtgcaggttcgaccagatcgaggcttcggtggcgccgcccaaggccaccagggccaggcctggcaacaacgcttgcagttggggcgccaggttcaatgggatccagtcccccgacagcagcgccaggcgcaggctgtccaaaggccgtggctcggcctgcaggtagtgggccagcatctgcagttgcgccggcaccgaattccacagcgtcacctgatgacgctgcaccagctcggcccagtgcgacgggtcggcgccgcgtgccgggtcgggcagcaccagggtgccgccgaccgcgagcgggccgaacaggtcatacaccgacaggtcgaaactcagttgcgccaggcccagcacgcggtcagttgcgctgacctcaaagcgccggttgatgtcctgcacggtattgagggcggcgcggtggctgatcatcacgcctttgggctcgccggtggagccggaggtgtagatcacgtaggcgaggtcgtcggggctgccgtcggctgccggaaagtccggcatggctggggccaattggtcgacggcatgccaggccagagcgtcgggcaacggcacctggggcagcgcctgggaacagccgagcacatgccgcacctgggcgctgtgcagcacgcggtcgcggcgggcggccggggcgttgctgtccaggggcaggtaggcagcaccggccagcagcacgccgtaggccgccaccacttggtcgcggcccttgggcatgaggattgcgaccggttcctgggcccggcaaccggcggcgtgcaaggccgcagccaccgccagggcgcgctccatcaaggcggcgtaggtcaggctgccatgggcatcgaccaccgccagcgcctgtggtcgttcccacgccatggccagcaggccgtcatgcaggcggccggtgggcagcggggcggcactggcattggcggcgaggcgctcacgctgttgccaggccggcagcggcacgtgcatcggttggtcccaggcggccgggtcgagggctaacaatcgcagttcgcaaacgaaggcttgttgcatgtcctcgatgaggccgtctgggaacacgccttggcgcacgtcccagtgaatgtgcaggccctgggcgtcgtccatcacctggcagtcgagggtcacctggggcgtctgggtgatgccgtggccgacccggcgctggctagtggccggcggttcgatccccaggccgatggcactggtgaacaccaccggcatggcggcggcttcccgcccgcggcgccggccaatttcacgcatcacttgaatgccggaaaacagccgatgctccaggtcggcaaacaattggttgcccagttggcgcgcctggctggtgaagtcctggccttggggatcgttgacctgcaacacgctgaccgaggtgaaatcccccaccaactggcccacctgcggatgcaggggcaagcggttgagcagggtcaggttgaggctgaaggcgggttgctggctccagcgctgcaaggtgccggcataggcgctgagcaccacgatggagggggtgaggccgagggcgctggcggctcttttcagggcggcccattgcgaggcgtcgagttgcgccgagtggcgttgaaagcgcggcacacgggtgtcttcgccgcccaggggcgccggcagctgcggtgcggcgggcagttcgtcgatgcgcgccagccagtagtcgcggtcgcgctggtggcggctgccttcgagcaggccgcgttcggccagcaggtagtcgcgaaagctgatgttcagggtgggcaagcgggcttctggatcgtgcagcaactgctccagctcattgaacagcaattgcgcgctggcccagtcggcgatcagcgagtccatggaaaagtgcagggtgtcgccactgtcgctgcgactcaggcgcaactcgaacagcggccaggcctcggtcgggtagagcttctgctccatggcctggcgaatctgttgcacgccgtgttggtgctgttggcgggtggccccgcgcaggtcggtaaccgccagtgggtaatggtcgacctctgcgagtacgcgctgggagccttcgctggcgatcaccgcgcgcagcatgtcatgccgggcgatcaggcggttccacgcctgttccacctgctgcgggtcgaggttcggccagctcagttccaggtaaccatggcaggcgacattgccgtagccgaacgaagactggcgcccgagcaggtaggcgttctgtacgtcggtgagcgggaacggcgcgtggcgctgggccgggtcggccaccacctcgggtcgctcttgggtttgcagcaggtgcaggatctgttgcttgtgctcacgcagttgcgccaggcgttcggcgttgagcaggccctgaggcgcgcggaacttgagttggccatcctggggccagagctcgacgcccagggatttgagttcgcttaacagtttggcggcgggcatggggacagctcctggaagaggggaagtgtgcgcaggcatcagatgaggccttcttcaacggtgtcgggggtgggctggcgctcaagggcgtgcgccacttccagcaggctggcggcgccgaacagctggcccatgggcagctccaggccaaggcggctgcgcagcatttcgagaaaccgcgtggcgagcaggctgtcgccgcccaggcggaaaaagttgtcgtggcgtgacacgctgggcacgttgagcaactgctgccacaactcggcgacctgctgttcagcgacgctcaacggggcctcatccggcgcgggacgtgcctgggccgcagccgccaagggggcgagcaaggcgcgacgatccaccttgccgttgctactcaggggcagacgttccagcaccagaatctgttccgggcgcatatacgcgggcaggcagtgttccaagtgctgggcgagcacgtcagcgtgggtgctggcagcaactgccgccagcaagcgcgtgtctgcgaccagcgccacggcctggtttacacagggatgacgggccagggcggcttcgatttcccccagttcgatacggtggccacggaccttgacctgggtgtcggcgcgaccaaggaactccagcaaaccgtcgggccggtagcggcccaggtcaccggtgcggtaccaaccgtcgataaagcactcggcattcaactgcggtgtatggcgatagccgcgtgcgacgccggcgccgccgatccacaactcgccggtgacccagtccgggcagtcgcggcccagggcgtccactacccggtacgcctggttcgccagtggcacgccgtaggggattgaacgccagcccggcaacggctgctggacttcaaagtggttggaccagatcgcggcttcggtagcgccgccgagggcgataaagcggcagtgcggcgcctgttggcgcaggcgttgcggcaggtccaggccaatccagtcgcccgacagcagggctactttcaaccccaggggttggcgctcaagcgcgttggcttccagcaacatatcgagcagcgccggcacgctgttccaccggcttacgcgatggtgttgcagggccttgagccaggcgcgggcgtcgcggcgctggtcttcttcgatcaacaccagggcgccgcccaccgagagcaggccgaacaggtcatataccgacaggtcgaagtccagtgctgacagcgccaagccccggtccgaggcgtcgatgctgtagcaacgattgatctcggccacggtattcatcgcggcgcggtgggtgatttccacgcccttgggctggccggtggagccggaggtgtagatcacgtaggccagttcgttggcgcacacggccacgggggccagcaacggttcggcgcattgtgcctgtgagggcgtgaggtgcttgacccccggcaagtgtgggtcgtgctcggcgaggatcaggccaacgccggcctgttgcaggatgcgctggcagcgttgcaacggttggtcgacccccaccggcaggtaggccgcgcccgctgccagcacgcccagcacactggcaatctgttgcgggcctttggccagggagactgccaccaggtcaccggctgccacgcctccgtccatcaggctgcgggcgatgcgcagggcgcggtcggccagttcgccgtagctcaggctcccatgctcgccccacaacagcgcagggcgttgcggcgattggtgcgcctgttggaaaaagccctggtgcaggctcgggtcccccgcaacactggcgccaggggcattcaaccgtgcgcgtacctgtgcctgggccagcggcagcaggtctggcggggcgctgtcccaggggtgttcggccaaccagtcaaggctgtgcaggtaggcgtcgaacatcgcttcgaccagcccttcggggaacagcccgaccacgcggtcccagttcagggcgatgccgccgtcagcttcgaccacctgatggtcgagccacacctgcggggtttgggtgaggccgaagacctgcctggcgaagggcccgtccaccggcgcggcggtgccatccggtacgcccagggcgctggtgaacaccaccggcatgctcacctggtgctcgtcattgctgcgcgccagttggcgcaacaggctcaccgaccccacgcagcgatgttccagggcctcgccgagcgtgtgctgggtgcgcctggcgcggtcgagccagcgttcgccggccacgggcacgtagccgagcagggtgagggaggtgaagtcgcccatcacctgatcgatctgcggatgcacaggccggcggtcgaacagcgtgaggttcaggctcaggtccgggcgcgtactccagcgcccgagggtttcggcaaacgcacagagcagcaccgccgaggcagtcaggctgtgctgttgcgccttggccaggatcgcttgccaggcccgagccttgacctgcccttgcaggcgctcgaagcgcggtcggcccaggctggcggggtcggcagccaggggcagttgcgggtgcggcggtaaggtgggcaggcgtgcttgccagaactgctgcgcagcgtgcagttcggcgggtttcacgccggcctgaatctggtagtcgcgaaaggacaattgcagcggtggcagggccagcgtcggctcgcggtacaacgcgtcgagttcggtatagaaccgcaggatgctgagtgcgtcgaggatcaggttgtccaggctgatggccaggcgggtatgccggccctgggtcaccgcctgcacatcgaacagcggccattgggcgggatcgaacacgcggtgggcacagtgttcacgcaggtcttcgaggcaagcgtggctttggccgatcacgaaggtgggcacttggggcaggatgcgggcctggcctgtttgatcgaacaccgcacgcagcatttcgtggcgttcgatcagacgcccaagggcgttttgcaggcgcggcaggtcgaggtcttcgacgtcgtattcgcggtagaaatggcagctcactccgcccaataccaggctcgggtcacgacccagccagtaggcttgctgcacctcggtcatggggaagggcgcgtgacgttgggccagatccggaacaacggtgcgttgcggttcggcctcggcctgttgatgcaggtcggcgcaaaactgcgccagcactggtttggtaaatacctgggcgattcgtgcgccgcccagcccttgttcggccagcaggcgcaccaggcgcgtggcgctcagggagtcgccgcccagggcgaagaagttgtgctcgcggcacacctcgccacagccgagcaactgctgccaggcgtgggccacctgttgttcaatggccccgcagggcggcgacagcacggcctggtaagtgccgcgatggtcggccagccagccgttgagtaccttgcggtccaccttgccattggtggtcaacggccattgtgcgcagccgaggatcaggctgggaatcatgtaggctggcaggcgttcgaccaggcctggaaacgccagcgcggtaggttgcatcgggccattcgccaggcgcaccaccgccgccagctgctggccggcgagcagcgccaccgcctggtcgacgccggggcaagccagcagcgcgtgttccacttcaccggcttcgatgcggtagccgtgcagcttgagctggaagtcgctgcggcccaggaactccaccgtaccgtcggggtggtagcgcgcactgtcgccggtgcggtaccagcgcaggccgttataaaccacaaagcgttcggcactgcgcactgggtcgccacgataaccctcggccactccggcgccgccaatccacagttcgccgggcacccagtccgggcagtcatggccctgcgggtcgacgatgcgcaggctgacgttatccaagggtttgccgtagggcaggcaatgccagtgcaacgcctggccgggcacgacttcgaacagcgtcgagtgaatcgccgcttccgtcgcaccgcccagggccatgaagcggcatccgggagcctgggcccacaggcgtggcgccagctgcggcgcgaccttgtctccgcccagcaagactgcacgcaggggcaacggggcgtcgccacagccgagtagcatgtcgagcagcgccggcacgcaattgagcacggtggtgcggtgttgagtggccagttcgcgccagcgcagggcatcgcgctgcgcgtggggctcgatcaacaccaccgccgcgccgcaggccagcggggcaaacaggtcgaataccgacaggtcgaactccagcgccgagagcgccaggattcggtcatcgcggttgagttgcaagcgccgttgcaggtcctccagggtgttggcggcggcctggtggctgatctccacgcctttgggttcaccggtggaaccggaggtgtagaggacataggccaggtcgctgaccgcaccggcccgtggcgccgccagtgcgtcgccagcctgcggcagttgggtaagcagcaggcgggcaccggcgctgtcgcagattgtgcggcagcgcgcagcgggctggtcgatgccgataggcaggtaggtggcactgcacgcgaggatgcccagtacggcgatcacctgctcggggcctttgggcaattgcagggcgaccacgtcaccgcgttgcaggccctggccctccaggtacgccgcgacgcacagggcgcgctcggccaactcgccatagctgagggcgtggtcgccgtacaacagggctggaagggcaggcttcagccgggcctgggtgaaaaaaccttcgtgcaggcgttggctcggcagcgtcgcgacgtggccctgggcggcgctgcgctcggccaactggcggctggggatcagcgccgaagtcgcttgatcccaggcggctgcgtcatgacacaaaccttgcaacaggccggtataggcgtcgaacagtccatccagaacgccctcggcgaacagcccttcacgggcatcgaggttgaccaggatgccgccgtccagttcggtgacttgggcgtcgagccacacttgcgggccctgggaaatgatccaggccggctggccgaaactctcctgcacaccctcagcgaacaattcccccagacccagggcactggtgtacaccacgggcgccaggacttgctcgccacgccggcgtgacagctcgcgcaacacctccagcccggtaaaggcactgtgggccgcatcgctgtggaagcgttgttgcagccccgtggcacgggccgcgaaggtgccggccacatggccatcccaggccagcaggatcgacgaggtaaagtcaccgaccaggcgctcgatgtcctcgtgcaacggcgtgcggttgaacaacggcaggttgagtaacagctcgggcgtctcgcaccaggcgccgagggcttcgcagaataccgccgccagggccatggccggggtgagggcgtgctcgcgggcgtggcgttcaaatgcctggcgctgggacggcgtcagccaatggtgacggcggcgcacttggcgctcatcgccctggggcttgatgggcaggcgcggggcgccgggcagggtgtccaggcgctgcaaccaatagtcacgggcgttttggtgacgtgcccggtgctcggggctggcctgttcctggcgcaggtcggccaggtagcgcgggaagctgtaggccagcgcgggcaggggctgttggcgatacaactgcaccaggtcgcccagcagagtgcgcaggctcaaggcgtcggcggcgagcatgtccaggttcaggtgcaggcgggtgccgtggggcaatagcgagagctgaatatccagcacctggccctgttccaccgccaactggcgatgggacaacgcggcgcgcaaggcgtgcagttgctgttgcagttgtgtggcatcggcctggcgcaggtcatgcaccttcagccctggccaggggctatggggcaggatctgttggcgaccctcctccagaaactgcgcacgcaacatggggtggcgtgccagcaaggcccgtaccgcggcttccaggcgaagcgggtcaacgtcgtggccatcgaattcgttatagaagtgcgccgccacaccgcccagctgttgccctggggcgcggccgacccagtacgcgtgctgcatgggcgccagttcaaagggcaggccgtcgtccgtatggctattgacgggcgcgggcgtcaccggcgcggtgtccagcagcaccagccaggcgcacaggcgtgggtcggccaccagctcggcgaaccgtgcggccaggccctggcggcgccattggccggcgaggcggatcagggtcaccgaatccagcccccattcaatcaggttggcctccagggggatctgctcggcaggctggcccagggcttcggacagggaacggcgcaacagtgttgcggttgaggtgcagggagtggccatggctcaacgtcttctcatcgctagggcccgggccggcgttggcccaggcgctgaaggcaggtagctgcgtggaagaagatgctagtcattctcattgtatggactacccggatcgaatcgtttttgccccgtatccgtttgcctggcgcgggtgacagctgcgcgggggcgggccatggctttgatcactgcgcgggatacggttggaaaatgacttgaatcgggtagcgctgcgccgccgcccttgactaccgtcgctcgccgcccttttgcagggcttgacccttgatggaggtgtggatgtcagtcgattcaggtttacaagtgcgcggtctgtgcaagcgctacaacaatggcgtccaagcgttgcgcggcgtggacctgaatgtgggccctggcatgtacggtttgctcggccccaatggcgcgggcaaaagcagcctgatgcgcaccctggcaaccttgcagcaaccggacgccggcagcatcgaactggatgggctggatgtgctcgccgagcccgggcagttgcgccgccgcttgggttacctgccgcagcagttgggggcgtacccgggggtgagtgcgcgagatttgcttgagcggttcgcctggctcaaggggcgtaccgacagccgccagcgccgtgaggaagtcgaaggcctgctggccaaggtcaacctgcaggaagccgcgcaccgcgcgctcgccacctactctgggggcatgttgcgccgcttcggcattgccatggccctgatcggctcaccgcgcctgctgattgtcgatgagcccaccgccggcctcgacccggccgagcgcaaccgctttcaccgggtgctggcggatgtggcggccgagtcgatcgtgctgttgtcgacccatatcgtcgaagacgtcgagaacctgtgcagccgcctggcggtgctggccggggggcggattgtcatcgaaggccgcccggcagatttgctgcgcgccgaacagggccgcttgtgggaggctgcgttcgcccgtggtgagccgctgccggctgccttgcatgtggccgccagccctgttggcagtcgggtgatcgtgcacggcgggcgcccggctgacccgcgcttcacgccccacacgccgcgcctggaagatatctattacctggcgctggcccaggccggcgaggcgggcgaggcatgactacctttgctctgttgatgcgtgaagcctgggtggaagtgcgcgccgggctgcgcagcggtattccgttgctggtgtttttgggcctcaccggctatttgctgatgtccctgaccaatgccgactacgtgcaaaaaatgggcgccagcgacatcgcgcgcaatgccccgagcctgatctacctgatgtcctgcgggtgcatgttcttcctgttcttcgcctgggcctgggtcttcgcacaaccggcgctgcgcgaccgcaaggcgcagctggaagaggtgctgctggccttgccgctgtcgctgccggcattgttgtgggggcggtttattggcgcagcgctggtgggcggcttgctcgccagttcgctgatcgtcgggtttttagtcagcccggtgctgggttggctcggctgggtgccggcggcgagtatcggtgcaccgatgtggtcggcgctgggatttgcctgggtcgccttgttattgccggtgagtaccgggatcggtgcgctgtattacctgctggccttgcgcagccgtggcttggccgcgccattcgggttggcgacggtgttgatgctgttgtggatgtttgccgtggtggtgctcaagggcgggcatatcaacccactgttggcggccagcctggacccatcgttgtttacctttgcccaggctcaggtggaaacctggagtgccgcgcagaaatcccaatcgctgttggcgctgaccccgggtttctggcttaaccgcctgctgtggtgcgcagtgcccctgctgttgctggccgtggtgttggcccgcaccacacgtcagggtttgatgggcaagcgtagcggggcggtgttggcagaaccgccgatgctgttggcgaacgccgtgacgttgcctggcccgctggttagcagccagtggccacgggccttgtggcgcgaggcgcgttggcagatacgccaagtgtttgcccggcgtatcggctgggtggccctgggcttgctgctggtgatgggtgtgctcagtggttttgtccacggcgtgtggcatgcgcgtgggccgatggtgcctcgggcggatctgaccctgccgctgctgtcgagcgcgttgtttctggtgatcgcgtttattgtcgcagccttggttgggctggtgtgccggcgcgatgatgtcgaaggttttggcgccatgttgcaggccactgcggcgccggcgtggttgcgcctgctggggcgggtggcctgcgtgctactggcgacgctggccctggcgttggtgccgggcctggcgagcttgctgatcagtgcgattgccgcgcccgacagcctggcgcccggctttgtgctggtctatcaagcgctggtgttcgcgccgccgctgatggagttggcgatgctcacggtgctggtgcatgcgctgattcgtcgctcggggctggcgtatgccacctcgatgctgctgacgtttttcctggtgctcaaccatgaattggggctggtcagttacccgccctatgccatggcgatcccggcgcatgtgagtgtgtcgctgctgaccggctgggcgccttggctggcgtttctcgccaccttggccggctggaaactggccggttgcctggtgctactggcggtggcggcactggtgttgccccgtgggccggagcggcggcgcttgagtgaggtgcgcgacggattgctcggtttgccgggtgggttgctggccctcggcgtcgtgggcatgctcggcagcggcgtgctgttgcagcggcatctggtggagctgggcggttatcagtctgttgctgcgcaacgtgccgaacgcgctgactgggaacagcgctggctgcctggcgcgagtgcctggcaggtggccggcgggcagttgcacctgcgggttgattcggcggcgcgacaggtagtgggtcaatggacgttgcagggggtggtcgctgcccagctggacgccgagttaccgccaggcctgcaggtgacggctgccagcgtgatgggccggccggtcaggttcgaacaagccagcgagcatctgcgcgttcctctggacggctgtgcggcgagcggttgccaggtggcgttgaactggacggtgcgcgccgacggctggcccgccgaaggtgaggccttctggctcgggcctcagggtgtgtggctgcaagcgcgccgtgtggtgccgcgcctgggcctggacagcgaacgcctactgcgtgcgccggcccagcgtagcgaagccgggctgcctgtgcgggtgccccaactaccgacgggcgcggcggtggccgtgaaggctgtcgccccggccggcgattggcaatggctgatcgaggtcgatggccgcgcctttaacggtcgcagccttggctcactggactttgcctatgtcacgccgacgcaggcagaccccagccgtgcgcacaccaccgttgaagtacagcaagacctggacttgatgagtgcctgcatagcacggcgcctgggcagccggccccgtgtcgaacacctgagcctgtggcctgcgggcatgggcgccagccgtttgagccacggccatctattgctcagccagtcaccgaattgggacgtggcgtcggtcggtgtcgggcgctggacgcgtcgtgcctacattgccgagctgcttgcccgccaatggctgatcgaggccagcgatctgcgccaggtccccggttacctggggttgagccagggtgtggcgggggcggtgggcctgctgtgcgtggaggacgttgacggtgctgacgcccgcgccgcgctggtcaagctgatggccgacgacctgacgcgcgccctgggcaatgacggtgagcctgtcggcaccctggccgatgctcgcgaacagggctgggccgcccactatgccgcgctggtcagccttgactgggtggcggcgcaatcccccgaacacctcatggcgatgaccgccgacgtccgtcacggccagggatggcccgctgcgatccagcgcctgctgggcgcaccctccgaacatgcgattgccgccgcgctcaagcgctgggggcctgcgcaatgaatgtgaaccatccctgccttgtggagctttgccatgtcacctgaactgtctatccagccgctacgccgtcctatcggttggcgggccaacgtgctgacccaagccatggcactggccttgtccagccagatgtgtgcggcttatgccgctgacgctcaaccgacggccagtaccgagaccatcgagctggcgccggtgacggtgagcgcgcgattgaaccaggaaagtgccaaggacgttccgttcggcctttcggtgctcgatgggcaaaccctcgagacccggcgtttacgcaccctggaagacgccttgcgcacaacgcctggggtagatgtgaattcctggggcggcgccaacgatgccaacgtgcgtatccgtggggttggctcgctgaaccagatgagcatggacgatggctcggtggtgctgaacgtggacggcgtgccgatgtcggtgcgcaacgcagcgatggccaccctcgacgtgcagcaagtggaagtgctcaaggggccccaaggcaccttgttcgggcgtaacagcgaagcgggcgcgatcaacgtcaccacgcgcaaacccacccgcgagctggagggctacgtgcgcggcgaagtgggcaaccaaggccagttcatgaccgagggtgcggtgggcgggccgttgacggagtcgttggccgggcgcattgccgtgcgtcgcagcggctttgataactgggtcgatgaccaacaagacggcgaccccctgaccaaaccccgcgacctggccctgcgcggcagcctgttgtgggacaacgacgcgggcaccaccggcctgctgaccgccgagcgccagcgcgctgatcactatgccggcctggagatcctgcgaccgttcggcaaccgccccagcctcgactacacccctggcacgttcaatggcaacaagaagaccaacgagcgttattccttcgagctcaaccatgacctggcccaggcccggatcacctcgatcagcgcctataccagcactgacttcaatgcggtcaagggctatgatcgcaacatcacccgcgcgctgtacggtcagccttttgagtacttgatcgaagactcggcccatgagcgagtctggagccaggacctgcgcctgggctcactggccgatgccgatgtgttctgggtaaccggggtgaacctgtcccgttccgagcgcagttttgactccaacaacttcaccaatggcgcccggcaactgcgcgatttcaccaccaacagctatgccgcgtacggcgaagtgaccttcccgattgccgaggactggaagctcaccaccggcctgcgccacacctgggaccgcaagacctacggcgccgattacagcagtggcgccaacctgatcaacgacagccgacgcttgcaggacgactacagcaccgggcgcgtggccctgagctacgcctggacgccgcagaccaacctgtacgcggtgttgtcgcggggctacaagtcgaccgggttcaacgactacgcgacgtcgatcaaggacagccaaccctacaaggcagccaaggtgaactccgcggaagtcggtttcaagcatgaaagcgaaggcggtgcgctgagcctggaaggggcgttgttcatcacccgcgtgcaggatgaccatttgctgggttatgacttcacgtccctggcggtcagcgcggtgaatgccgatacccgcagcaaaggtgccgagttgtcgagtacctggcatgtcagcgatgaactgaccctgggcagcgccatcagctacaccaacgcggtcgtgacctccgatgcgccgggggtgtccggcggtgatgtggtcaagggtagtcgcgtgccggacgtgccgctgtggagcggcaacttcagcattgcctggaagaagcccttgggtgaactgctgggcttgccggcgccgcgcctgaacaccttgctcaactaccgcgtgcagaaaaaccgcccggctgatgcgcagaatcactatgacctcaagggctacgccaagctggatgtgcacttggggctgcagagcggtggttcggaagtttatctgtggggcgataacttgctggatgcgcggtatgacttgtatggcgcttattccactgacgcggtgctgaccgggatgccgggcagggggcgttcggcgggggtggggtacagctacgagttctgaggcgtacattgccttcttgtgggagcgagcttgctcgcgaaaaactcacaggcaccgcgttcatccagggtgcccgcgttatcgttgaggtttttcgcgagcaagcccgctcctgcaggatcagaattggtaggtatagcccacacccaatgtgcgccgccgcgatggcccgccataggctaccggctcactgtagaaaccgtaggtgtcgtacgtctggttcagcaggttgtcggcgaacgcatacacttccccgaacttgctctccaaccctgcccgcaggtcgagcttctcgtagttatccaggttgaagtgattctgcgggtcggccgcgcgttcacccaccagatggtagttgaggctggtgttgaggatggtttcacccaggctggcgatgctgcccagtgggtgcttccaactggcgttgaggttggcgctccagcgcggcacatccggggtgcggttgccggccgcgacgtcaccggcctgaatggcttgcacgccacgggtgattttggcatcgagataggtggcactggcggccagggtcaggccctggtcgacgcgccagctgccttccagttcggcgccacgggtgcgggtgtcggcgttgaaagcgttggtggcgaaggtcgccgcgtcatagccgagcaaatggtcatcgtgcacgcgggtgtagaacagcgcaccattgaggctgccacgaccctctgctgtcgtgcttttgaagcccagttcagcggctttgctgacggcggccttgtagggggcgctgtcgctgacctgggaggcatagtcattgaacccgccggatttatagccccgggccagttgcacgtagacgttggtctgtggggtgatcgcatagctcagggcggcgcggccggtgccgtagtgatcggtcagtctgcgcgagtcgtccacggcgctgctgccggcgaagtattggccgttgtaagtattgcggtcccaggagtggcggtagccggtggtgagcttcaggcgttcgctgagggggaaggtcacttcgccgtagcctgcgtaagtggtggtggtgaagtcgcggaacttggcgccggacgtgccgtaggtattgcgcggggtatcgtagctgcgttcgttgcggctggcggcgacgccggcgacccagaacacttcagcgtcgggcaatgagctcaggtgcacgtcctggctccagttgcgctcgaaggatttgtccaccacccagaactcgctgggcgtgccatagagggcgcccatcagtttgctgtcgtaggcgatcaaaccggtgaagtcggcagtgtcagtggcggtggtggacgtcaggctgctgttggcgaagtcgtgatcgactttnnnnnnnnnnnnnnnnnnnnnnnnnnnnnnnnnnnnnnnnggtggtcttgtcgttgtcgtcgaacaggccgggtgtcaggtccaggctcgggtggctgccgtaggggcgcaacaccagggagttggtggcgcgttcggtttgctggcgttcggcgctgaccaatacgtgggtgtcatcgttgaggttccacagcaaactgccgcgataggcttcattgcgtggcttggtgatggggtggtgggtctggtcgttgtcgatccagctgtcgtagccggcacgccgcactgccaggcggccgctgaagcggtcactgagcgggccgccgatggcgccttcggtgaggaactggcctttctggccgacttcgccacgcacataaccctccagttcgcgggtgggttggcgggtggtgatattcaccgcgccggcctggccgatggcgccggacagtgtgccctgggggcccttgagtacttcgatgcgatcgacatccagtgtgcccaagcccaggctgcgcgacgacaccggcacgccgtcgatattgaacgccaccgagctgtcgtccatggacatttgatacagcgaaccgacgccgcggatcagtacgttgaaatcattcggcccgccggaagagttcacgctgacgccggcggtgttgcgcagggcgctttcgagggtgtcgaggcgttgggtgcgcagctgttcgccgctgatcacgctgacgctgatcggcacgtccttggggtcttcctgggccatgcgcgcggtgactgtcgaggcgggcagttgcaggagttcgccagcggcaaaggcagaaggggacagtgtcaatgcaattgctattgttatactattacatttgtagcaagattgacgggtagccgtcgtgttgccttgtgcagacatgatgagacctagactgaacagattgatcgggcgcgttgcgcaggggcagcggcggtttgttacagcgtgtcgcgctccaaatgctaataattatcaattgcgagcttctaccctgatgtgatctgattcgagccgtatccggtcagccaggagatttacgatgtcagctgttcaaggaggcgcaggggagccgatgccagtctcgcgaatcattacgggcgggtttgggagcgatctcggcccaggggcgcattgccgcgtcacccgcatgacgctgcaggagggtctggatatcgtgcgttggcaaagcacgttcgagcagcccgttgaactgccgctgcaggacgacagcgaatgcatccacttcagttttaccaacctgctcaagggcaaggctgcgtgcagctttcacgatgggcgccggcaacgtcgctatgcgattgatgaaggcgcgggcaatatcagctttggtcgctgccgccatggcctttatcaccagcacggcgaaatcgacaacatcaccgtgatgatccgcccggagttacttgcccagtgggagttgaaactcgacccgcttctgaaccaagccttggcttgcgagcattgcttcctcgacggccatcgcagcggcgaaatgagcgccaccgcgcacatgctcggcctggccatggaccacggcacccagttggcgccggcccagccacgcagcagcctgtggttgtacgggcaaagtgtcacgttggtgagcttgtttctggaggcgcgccaggacgctgagtgcacctgccgggtcagccacaccgaccgtcagcggctggtgcgtgctcgcgatcgtttgctcgaagacttaggcaaggcgccgagcctgtcggagttggcccgtgaatccggcttgagccagcccaagctcacgcgcgggttccgccagctgttctccaatagcgtctacggcatgttccagcagacccgcatgatccaggcgcgcagccgcttgatgagcggcgatgaatcagtgatgcgcatcgcctcggacctggggtatgccaacgccagccactttgccacggcgttccgcaaacagttcgggatcaacccgtcgatgctgaagaacggtggccgtggcaaatccttgggggctggttgaggcggtcggtcagaacaccgctttgacctgcaagcccagcaccagcgcattgtcgatgttctccccggaaaacgcccccggctcgatgatgtattgcacatccgggcgcaaggtcagccaaggggtggcctggtagccataactgagctcgatcagctgttcggccgtgtccaggtcgggataggccgtgccggcgttgaacgctgccagctcctgtacatcacggctgcgcgggttgggcaccgcacggccatagcccagggcgacggtatcgcgtgggcgaccttcgaatggcttgtacagcaccacgcctgcgccataccacttggtgaacggcgaggccgcttggctggcggcggagtattggccgaaggcgtgaaggctgcggccttcggatgattgtgaggcccacaccgcctggtcgatcaagaggtagtgaccgccacgcccgctgacgtccttgttgctgccaatgcgttttacatcggaactgtcgtagtaataaccgagcttgtattcaccgggcagtgcgcccgcatgcttgtagatcagttcgatgggcaccaccgtgccggtggtgtgcttgggccccaggtgccaggcgcggctggcgttgccgttgctggaagggtcgacattgaacgctgccacgcgcagttgccagttgggcgaaaagtcgtatttcacccgggcaccgaggtgcgcattcgggtagttggcccagccactgccgccggacatgttcagcggatgcccgcagaagccggcgttcatgaagttgcacaggatgccgctgtccaagccgccgagatcattgcccatggccatatagcccagcttgaggttcagcgccggggtgaacagcgtgcgctcgtaactcagctcggtgaggcgcgtgtagaggccgccgtagttttcctggatcggcaggcggttgcccaccaggtcctcggaggcgctgttgccgcgtcggtcgttgatggtcagctggatgcggtcgccgttggtgaaaccgtagagcttgcccaggtcgaactgcacgccgagcttgacgttttgcgagtagcgcgccgaacggtgctggccgccgtgggcgttgtaggcggtctcgccgctgtagtcaccggtaaagcgcacaccttgcgcgtcgagttcgcggcgcagaccgccccagtcgccggtcagggtggtgtcgtcggcttgaacgggcagggcggccgcaaaggtcaggcccagcgccaggcgccaggcggtatgaggagttggggtcatgggggatctttccaaacacaaagcgcggtgcctgggcaccgcgcgaacagagggcagttacggcagggcgtaggcgatcacgtagtcgccacggtcggtggactggcgtgcgccgccggcggtgacgacgatgtattgcttgccggttttgggcgacacgtaggtcatcggcccgccctggctgccgacgggcaggcgggctttccagatttcatcgccattgccgctgttgaaggcgcgcaggtagaagtcctgggtgccagcgataaagatcaggccgccttgggtggacagcgtaccgcccagggtcggcaggccaaccttgatcggcaggtgcatacgaatacccagggggccggtgtcttcaacggtgcccaccgggacttgccaggcgaccttttgcgtcttcatgtcgatggcggtcaaggtgccgaatggcggcgcctggcacggaatgccggccaccgacaggaagcggtttttgttcaccgcatacggcgtgcccttgagcggcacggcgcccataccggtgttcagcgcttcaccaccggaagaggcctgggccttgttctgcgacggcaccatctggatccacaggcccaggcgcatgtcattgacgaagataaaaccgtgcaccgggtcggtggaaatgctgccccagttcatgccgcccagggaaccggggaagctcagggatttatcggtgcccggcgcggtgtacaggccgtcgtagcgcatgcccttgaagtcgatgcggcacagcaactggtcatacggcgtggcgccccacatgtccgattcggtcagggtttgcgcgccgatctgcggcatgcccacggatttcggctgggtcagggaatacggctcgttgggaatgttcgcggctttgaccgggacttcctgcacgtccgtcagcggcttgccggtggcgcggtcgagcacatagatctgcccggccttggtgccgatgaccacggccggtacggccttgtcgctgcctggcggggtgaagtcgatcaggcttggctgcattggcaggtcgaagtcccagaggtcgttgtggactgtctggtagacccacttctcggcaccggtggaggcgtcgagggccagcaccgaagcgccgtatttgtggttgagttgggtgcgttccacgccgtagatatcggtggatgagctgcccatcggcaggaagaccgtgttcatcagtgggtcgtaagacatcggcgcccagctgttcggggtgctgcgcacgtaggtggcgtcgcccgtcggggcctgcttgtcttcagggttgcctgggtcgaacgcccagcgcatttggccggtgatcacgtcaaagccacggatcacgccaccgggcatatcggtctgcacgttgtctgccacgcgaccgccgactacgacggtggtgccggccatcagcggcgccgaggacagttggtagtagctgtccggcacattgcccaggccggccttgaggtccacctgaccgtgggtgccgaagtcttcgcagaacttgccggtgtcggcgtctacggcgatcaggcgtgcatcaatggtgttggtcagcaggcgacgctggcactgcgcaccggcaggcacgctggcggtaaggatcggcgagctgttgggctgggtcggctgggcaatcggcgcgctggcgtcgaaatacgccatgccccggcaacgctgccacactgccgatttggcgttgacttcgttcttccacagttctttgccggtgtcggcatccaacgcgatcaggttgttgtgcggggtgcagataaacactttgttgccaatctgcaggggcgtcagttggtcttcggcaccgttgccgtcgctgatggccacgtcgccggtgtggtaggtccaggcgactttgagcttgtcgatgttgtcgcggttgatctggtccagcgcggcgaaacggctgcctccttcggtattcccgtagtgggcccagtctttctgcgcatcggccgcagccaccggggtaatgcccgggcctgcaccggtgggcgcaacgcttgggtgcgcgacaaacatattgcccgctgccaccgccacgcccagcgccaacacggcggcgacgccataggcaccccgcgccggtttgccggccagcaacggatacaccagcgcgaccaccacgccaatcaccgcaaacatgaacagtcgcgagaacagcggccagtattccaggcccacgtcggccactgcccacacggcggtagccagcagaaacgcggcgaacaaccaggcgccggccggcttgccgcgggcaatcagcagcccggaaatggccatgaccacgccgcccagcaggaagtaccaggaacctcccaggctcaccagtttggcgccgccgacggcaagcgcaaggccgagcagggcgatgacgacgcccaggcccaggagtaagaatctagagacgccagcggcgcgcgatgctcgtttcatgtcgaatggactcgagtgagagagggcaaagacgcgattttaacaagataagtaaccggttagtacattttagtcctgcaatagactgttgcaggtactgcgatgatggccagggccgctgctaccctgtggcgagggagcttgctcccgctggggcgcgaagcggccccgctctttgtttaaaagaaggggcctgctacgcagtccagcgggagcaagctccctccccacggtccagcgccgcctgttaaggcatcagaacttgaagcggcccaccagcccattgagctggccggaaatatccgtcagccgccctgacccggtctgcgccgaatgcgcaaagccttccaccaactgcgcgtcggcgtgaatttgggcgatatgccggttgatctcttcggccacctgatgctgctcttcggcggcggtggcgatctgggtgttctggtcgcgaatcgagtccaccgaaccacggatcttgtcgaagctatcgcgggcctgctggatgcgcgcaacgctggtgttggacaccagcaagctgccttgcatctgctgggtgacttcctgggtgcggcgggcgaggttgcccagcaggctgtcgatttcgccggtggagtcggcggtgcgacgcgccagggcgcgcacttcatcggcgaccaccgcaaagccgcggccctggtcgccagcgcgggctgcttcgattgcggcgttgagcgccagcaggttggtctgttcggcaatcgaacggatggtgtcgaggatggtgttgatgttctggctgtcttgctcgagcaactgcatggtctgtgtggatttttgcaggtcttcgctgagcttgagcacgctgccggtggcttcgccgatgtgctgctggccggtgtgcacgtcgcgatagccctcatcggcactcgtggcggcggcgctgcatgaacgcgcgacttcgttggcggtggcgaccatctcgttgaacgcggtgctcaccagttccacggcttcgcgctggcggccggcggcctggttcatattgttggccacggcgctggtgtcggcggcggcggtttgcaggtctgaggaggcgttgccgatgcgctgcaccagttgcgcgatcatgctcaggaactggttgaaccagccggcgaggctcgcggtttcgtccttgccttgcaccttgagctggcgcgtgaggtcgccttcaccttcggcgatttcctgcaggccgtcggccacgccgcgaatcgggcgcacgatcacacgggcaaaactggcgccgacgatggcgaacaccacggccagtacggcggcaatcgccgcgatcaaccacgtcaggcgggtggcaccggccatcacttcgtcacgcttgatcaggccgataaagcgccagcccaggtctttggaactgaccacgttggccatgtaggccacaccgtcgatgctcacctcggtcacgccatcgccgtgcttggccagttcggcgtagttcgcgcccaggcccgccaggggcttgaagttgtgcgtggcatcgctggggtccaccagcacgttgccgtcggcttccaccagcatcaggtagccgctgtcgcccagcttgatggtgcgcaccagctcggtgagttgcttgagcgacacgtccaggccgactactccaaggatattgcccgtggcatccgcgacggtgcgcacggtgccgatcagcaccacatcgtccggggcccagtagtaggcgcctgtgcgcacggtcttgcctggcgctgcgatggcggcctggtaccaggggcgggtgcgcgggtcgtattgcgtcagtttggcgtcgtccggccaactggcgtagccgccatcgctcaggcccagggacaggtaggcggtgctggggtggcttttggcgaactgatcgaaaattgccagtagttcggtgttggttggcgtaagcgggatttgcgcggcatcggcaccggcatagctcttgaggttcttggctgcgatcacgcgcgggtctttggcgacgaagtcgacattctggctgatgccgtcgaaaaactgctgcatgccattgtcgatctggcggatctcgcggccgctgctgtcgaggaagttggccagcgcaccctcgcgcagattcagcaccacgataatggcgaccaggatgaccggcacgcacgcgatggccgcaaacgcccatgtcagcttctgcttgatattcatgacttcacccgcgggtatttatagttttggcaaggggagaaaaattagtgctgcgtgtcgcaggcgtttttgtgagaggcgaggccatgcgtaccctcggtatatcggccgagggcgcaggcacttgagcaagggtaatcaggcgatcgggtcaccgaccagggcatcgcggcgcatcgactgcaagttcttctcgatggtctcgcagatgctttccatctggatctggtgttcgctggaattgaacgggctttgcaggtcggtgccgatgcgttcgatggccagcagcatgaagcccacaacggtggaggccagcggcgtgaaccagccaagggattccaccaggcccaccggcacgatcaggcagaacagcgaaatgaacagccgtgggaaatacacgtaagggtagggcagtggcgtgttggcaatccgctccatgccgccctgggcgttagagaggtccaccagggtcgactccaaccgcgccaggcgaatgctgtccaggcgcccggcctggtattcgcgcgccagcaacgaggccgagccggtgaggatgtcattggcgaagttattggtggcgccgttgcgggcaaattcttcggcggggataaaagctcgcacttcctccgggcacggctggcccttgaggtgcgcagccaggcaattgacgtaagccacgtgacggcgcaacagcgtcgacttcaccgggttcacctcaccgggtgcgtcatcgagcagggtcaacacttgccgggcaaaactgcgcgagttgttgaccatcgcgccccacagcgtgcgtgcttcccaccagcggttgtaggcgctgctgttgcgaaaactgatcagcaccaccagggccgagccgagcaaggtcaggggcatcagcggcaaattgatcttggcggtgagaaacagcatgaagtccaccgtcactgccacatcccacaacaacagccagaacaacgcccagcccacatagcccatggtcttgatgatcaggcggtatttcttcagtagggcagctttcaaacgagaacctcgcggcgggcggttggcaacaattccctgttacgacgtcgctgagaggggaaggttcgcagcgtgctgaatcgattagtcctctaaccgccaggcggagggaatgtaaccaaaggttgcacgcaactgtgtgccacgggcatttgactgtggaacaactttggtactgatgacgtcttgtccggcaatcgctgtacattgcgttcgaggcgaaaagccattaatggcaggattattgaagtgatttgttttggagccgggctgcagggatttcgtagctgagatcagtggcatcaagttggatgatcagggctctttcatgcgtgtcagttcgttgaagttggctatgtgtaataccgcgcaagcgctcgaacgtcataaggattttgaatcgtgcatgagagcgcattaccacgtgctgctcgtgccctattcgagacgaccgtttttctacaagagtgcccttaaatacagccgcttgatggtgtcgtttgcattattgagccaatacttttccacaccgctgccgttgttggcagaagttaaagccttgtgcgtaacgcgcaagtattgttcgaaaaacagcctggaatcgatctttttgctgttccaggccctgggcttcatggaggttgcgccgcaccccgaagacagtcgcttcagggtgtatgcaccctcggatgaagcctgccgcgaagcgcggctgatgctcaccgccctcactgagtcgttggcgctgctctatcccgagagggaagtgttccggcagatgcgcgacctggatgaccgcgagttcctggcgctctacttcaagggttttgccatgatcctcgcggccgaactgacggtggatgtcttgctgcccgaatgttattggctggtcaagcgcgacgccggccatctgttgatgctggcgatctacaacgacgcctttgccccagagaatgaccgcgccaccttccggtcgtcttcctacctggccttggccaagcaactttccgtgtccaagacccacattatccgtatggtgcaggagggggttgaaaagggttatttcaaagcccactccaaaacccggctggaagttctgccaccctttgccagcctggtaaagcggttcatggccttttcatttgcgatgggcctgcatgctattgagatgggagcgtaaggatgcctgctaacttgaagttgcggcccagaatgcgcagtttgttgtcacctgcggtggcccaagccgaatgggtagggattattgcctgggtcggcatgctcctgattccgccggccctgaagttggacctttatatgttggccgtcacggtcggcctgctgattgtttgccgggtacatgccaccaccacgaactttctgctctggcgagtgctgggagtcacctatatggtgttgttgtccgtcggcttcgcttatctgattcatatgcacgcagagttgcgtatctatggcttgccgttggcggtgaccctggtggtgggcagtgcaatcttgtttatcagtgtccaggattatctggccgatgcgctattgatctggctgatcctgtggccgcccatgcaggcggatatatacgccggcaccgaggtgtatttgctgctgttctgcgcggcgtcggtgtccatcgggtttatcttgagttattcctacttgaagaacctgcgttcggtattgctggtggaaagcgagtttcgcgccttggccgagaccgactacctgacgtccatcctcaaccggcgcgcctttatgcagagcttcgagaagttgctcggtggggagcggggcggctacttcatcatgttggatatcgacagtttcaaggaaaaaaacgacctgtatggccacgacgtgggggacaagattctgcgcgccatggcgctgtgcctgaaaaacgccaagggcagccacagctttggacggatcggcggggaagagttcggcgtgttattgcagggcgacgatgtggaggtggcctgtgattatgccctggacttgttgcaggcgatccgcagcagtgtgcctgcgccccaccattacacctgcagtgcggggatggcgcgtttttcgccgggcgacgagttgtcggccgtactcaagatggcggacaagaacctgtacggcgccaagcgcaatggcaaggactgtgtgcacctggacggcgcattgctacaggcggtcttgtcctgacgcgtgccgtctagtgctgtgacagaacgctcgccagcaacccagggaagcggctttccagctcgtcacggcgcaacgagttcatatgggtggtgcccacattgcgcgtgtgcaccaggccggcatcgcgcaatacccggaagtgatgggacatgctggacttgggccgccctccgtccagttcgccacaggtggcctctggcacgttggccaggtagcgcacgatgtctaggcgcacggggtcgctcaaggcgtacagcacacgctcaagcgtcaattcttgcggggtagggtgtttgaaggctcgcatggggcggatcataacaggggggtagcgttcaataccatagttcgattaccatcgaactatcgaatcacccaccccttcctggagttctcaatgtcggctttgttcgaaccgttcaaactcaaagatgtgaccttgcgcaatcgcattgctatccccccgatgtgccaatacatggccgacgacggcatggtcaacgactggcaccatgtccacctggccggcatggcccgtggcggtgccggcctgctggtggtcgaggccaccgcggtcgcccctgaaggacgcatcaccccaggctgcgctgggatctggagcgacgcccacgcccaggcattcgtgcccatggtcaaagccatcaaggccgcaggttcggtgccgggcatccagattgcccacgccggtcgcaaagccagtgccaatcgcccctgggaaggtgatgaccacatcccggcctctgattctcgcagttgggaaaccatcgccccgtctgctatcgcgttcggtgccaacctgcccaacgtaccgcgtgccatgaccctggaagacatcgcccgcgtgcagcaggacttcgtcgacgcggctcgccgcgctcgcgatgccggttttgaatggatcgagctgcacttcgcccacggctacctgggccagagctttttctccgaacactccaatcagcgtaccgatgcctatggtggcagcttcgacaaccgcagccgcttcctcctcgaaaccctggccgccgtgcgtgaagtctggccggaaaacctgccgctcaccgctcggttcggtgtgatcgaatacgacggccgtgatgagcagaccctcaccgagtccattgaactggcccgccgtttcaaggacggtggcctggacctgctgagcgtcagcgtcggctttaccattcctgacaccaacattccttggggcccggccttcatgggcccgattgctgagcgtgtacgccgtgaagccggtattccggtgacctcggcctggggcttcggcacaccgcaactggcccaaggcgcgttgcaggccgggcacctggacctggtttcggtaggtcgggcacatttggccgacccacattgggcctactttgccgccaaggagctgggcgtggacaagtcctcctggaccttgccggcaccttacgcgcattggctggaacgctatcgctgaggtaagcctgcgcgttgcatgagccactcgattgagtggctttttttcgcctgtagtttttcgcgacctaagcggcgaaaaataacaaatgagaaccgatatcaaacgagaatgcactgatatatgatgcgcggcgaattcttggcaggtttgccgtcccatctggctcattcactaggttccacacccatgcgtcgtaccctgatttccatctgtgtgctccaggcgttttcccccttcgcgtgggcagagcaggcacctgccgagaacgccagtatcgagctgcaagcgaccaatgtcaccgccaccgctgaccttgagtcggcccaaggccccgtgcagggctaccacgccacacgttcagccagtgcgacgcgcaccgacaccgccattcatgaaactccacagtccatcagcgtagtgtccaaggacgtggtcgaagacctcggtgcaacgcgcctgcaggatgccctcgattacgcgggcggcgtgggccgcgccaacaattttggcggccagggcctgaccacctttaccgtgcgcggcttcaccaccggtgagttctaccgcaacggtttcccgatcaaccgcggttatccgaacatgccggacgccaacaccatcgagcgtctggaagtgctgcgcggccccgcgaccatgctctacggccgtggcgacccgggcggtaccttcaatgtggtgtccaagcagccgctggccgaacgcaccgtcaccctgggcagccagctcaatgaccagggcatgaagcgcggcaccctggatgcctccggcccgctggacgaggaaggccgcctggcctatcgcctgaacgtggtgggcgagggcggcgacaccttccgcgatcacgtcgagacggaacgctacggcgtgacgccggtgattacctggcaggccaccgatgacaccaaggtgaccttcgaaggcgatttcatgcgcaacaaccacccgctggaccgcggcctgacgcgcttccccaatcagcgcggcacgccctcgcgtgatacgttctggggcgacaaggacgcgggcaagctgcacaacgacaacaacatggcgcagttgcgtttcgagcatgcactgagcgacaactggaccctgggcggcggtttccagtggttggacggcagtttgaaaggcaatgccatcgaagccaacgggccgggcagcctgggcgccgatggccgcaccctgcaacgcaacttcaactaccgcaagttggaatggaccgacaaggactaccagctcaacctgaccgggcacttctccactggcggcttcgatcacactttgctcaccggtatcgagtacgaggactacgactacaagtcaattatccagcgttccagcgccgcagcgggcacctatccaattgacatctttgacccggtgtacggtcaaccccgtccggcactgacccgtacgccgacccacgacaaagaaaacctcaagacctacgccgcttttgtacaggaccaggttgctctcactgaacgtctgaaagtgctggccggtgcccgattcgagcgtttcgagcatgattaccagaactatgtaggtaaaagctggcaggccgccgacaacgccgtcaccccacgcgtggctgtgatctacgacctcaccgacaccgtcgcggtctatgccgatgctgcgcgttcgttcaagcccaacactggcgccagccgcgaaggcggtggttttgcgccggagaagggcaagtcttacgagatgggcatcaagtgggaggcgctggatcggcagttgagcgttgatgcggcgatctatcagatcgagaagaagaacgtgctgaccactgatcccgtggacaataccttcagtgtcgcggctggccaggtgcgcagtcggggcttcgacctcaatgtggcaggcaacctcacgcccgaatggcgcgtgatcggcggctacgcttacgtagatgcggaagttacccgtgataacacgttgcgctccggcacacgcttgatgaacatcccgcgcaacagcttcagcctgcttaacgtctacgagttccaggacggcgcgctcaaaggcctgggcctgggcgtcggcggcaagtacgtcgaccagcgcgccggccagactgctaacacggcattctccatggacgcttataccgtggtcgacttgctcggctactacaaggtcaatgagcgggtgcgtctgaacctggatgtgaagaacctgttcaaccgcgagtatgaagagggcgcgttcggcaatatctacgcctaccccggtgcaccgcgtaccgtgcaggtgggcatcgcctataccctatgatgaacaactgcgatatgtgggagctggcttgcctgcgatgacggcctgccaaccaacgcccactacctgacaccccacggtccaactgtgggagcgggcttgctcgcgaaggcggcctgacaatcaacacagttggattgtgtgcatatccattgctgcggtaacggctacttagggttccgccctgacggcggctcacnnnnnnnnnnnnnnnnnnnnnnnnnnnnnnnnnnnnnnnnaagcaaaacgctcttgccccaccactcggcacctcgcttgggctcggtgtgcccgtaatccgccagtgatttgggggggcgccgccacgcgccatccatggcgcggggcggctaaaccggcatccctgccggtttaccccccaaatccctgtcgaattccggccagcgtggtttgacggggcgcctaagatcaaaagcagatcaagatcaagatcaagagcgactcgcttcgcatcgtggttaccgtcggctgctacggtctgcaaagttgtgtagatacctagggttatcgcaggcgagccagctccctcgccacagtgccctgcctcctattcacctgtcaggtttgacagtagacactggcccttgatcgagggatgtttgcccctaacgtgccagcgcagcggtcggcgctcattgcttttcgaagccacgcttaatagggatattaaaaatggaacgggaactgatcgacgaagttgaagaactgatcaaaaagactaacgatgccgagcgtctgttcacccgatatgccaccaagtgctacacatcagctttgcaaaaatatgccaaggagatcagcgaaacctcctatacctatctgctggccgagctggccgaaagttcgctgagttcggaaattcttggccgcccaggcgccaatatcagcctggtcaggatcgagatagaggaggtcatgctcgaagccgatgtcatcaagaaactcaagcgggccgaaacccattacctggaaaccctggaatcggtgcgcaagttcgaagacctaaaacgcttcgaaaaaatgcaggacacgtccgatatcgtccgctcgataaaactaggggtgtcacggttcaatatcctgtttgtcattctgctgatcggcgggttgacctgggcggcgatcaatctgcctaaagaggccttggcattgatttccgcggcgatcggcggcgccatcactcacttgctgtccgagcgccaggccgtcctggcgctgaaaaaagagggcgataacacctgccccagagccaacaataacagtcaggaatgacgcgggctcacaacggcgtcaacacattcatcaccgtgtccagcgccacccgggtgtcatccagttgcaccagcgacgcatgccgtgcgcccagggcatcgcggttctggatcgccgtgaggatcgccttgtgccgcggcagactcaggccctgaatgtccgggcggcggttggtgatgttgatcgactcgcgcaacggcaacgagagcatgttgcacatataggcgagcaggtcgttgcgggtggcgtcggcaatcgcgcggtggaagtccaggtcggcctgcaacagttcctcgtgggtcttggcggtttccatgccctggtaggcgtgttcgatggtggcgatgtcttcatcggtggcggtggtcgcggccatggcggcgatttccggttcgaggatgcggcgcaccccggccagggtgttgaagaactcgctgtggggcgtggactgcatcaaccaggacagcacgtccgggtcgagcaggtgccatttcaagcgtggccgcaccaccgcgcccacccgtggcttggaatacaccaggcccttggcgctgagcactcgcgtggcttcgcgcaataccgagcggctgacctggtattcctcgcacagcgtggcttccatgggcaaccgttcctcgggcttgaagcgaccggaaacgatgtgcatgcccaagtcctgaacgatctgggcatgctggctcttgcgcggcttgggcggctggtgatccataacgacggggaggctctggcttaggttcgccgcatcatagcatcccaattagtgggaatgccgtgggacttctgccccgcgacagcccaccaggaagtcaaagtcacagccttggtcggcctgcagcacatggtcgatgtacagctggcgatagccgccgacgatgaggttctgcgcgggcggcaggtcggccatgcgcgctgccagctcggcatctggaatgtccaggtgcaggcgaccattggcgcaatcgagttcgatccaatcaccttccttcactgtcgccaacggcccgccggctgcggcttccggggccacgtgcaacactacggtgccgtaggcggtgccgctcatgcgtgcgtcggaaatgcgcaccatgtccgtcacgccctgggccagcagcttggcgggcaggcccatgttgccgacttcggccatgccggggtaacccttagggccgcagtttttcatgaccaggatcgagttggcatccacgtccagctccgggtcgttgatgcgtgccttgtacatgtcgaagttttcgaacaccacggcgcggccacggtgctgcatcagttcggggctcgcggccgaaggcttgagcaccgcgcccaggggcgcgaggttgccacgcagcacgcagatgccgccgtcggcgcggatcgggttgtcaagggtacggatcacttcgtcctggccgtagatcggtgagtcctgggtgttctcgcccagagacttgccgttgaccgtcaaggcgttggggtgcgggatcaggttggcttcacccaggcggcgcagcacggcgggcaggccaccggcgtagtagaactcttccatcaggaagcgcccggagggttgcaggtcgacaatggtcggcatgccgcggccgatgcgggtccagtcatccaggtcgagttcgacgccgatgcgcccggcgatggcttttaagtggatcaccgcgttggtcgagccgccgatggctgcgttcacgcggatagcgttttcgaacgcctccttggtaaggatcttcgacagcttcaagtcttcacgcaccatctccacggcgcgcatgcccgacatgtgcgccagtacatagcgacgcgcatccacggccggaatcgccgcgttgtggggcagggaagtacccagtgcttcggccatgcacgccatggtagaagccgtgcccatggtgttgcaggtgcccgccgagcgcgacatgccgccctcggccgcgaggaagtcatccagggtgatggtgccggccttgacctgttcgctgagctgccacaccaccgttcccgagccgatgtcctggcccttgtgcttgccgttgagcatcggcccaccggtgaccacgatggccggcacgtcacaactggccgcgcccatcagcagcgcgggggtggtcttgtcacagccggtgagcagtaccacgccatcaatcgggttgccgcgaatcgcttcttccacgtccatgctcgccaggttgcgagtgagcatcgcagtagggcgcaggttggattcgccgttggagaacaccgggaactccaccgggaagccaccggcctcgatcacgccacgcttgacgtgctcggcgatctggcggaagtgcgcgttgcacggcgtcagctccgaccaggtgttgcagatgccgatgatcggcttgccatggaactgatggtcggcaatgccttggttcttcatccagctgcggtacatgaaaccgttcttgtcggcggtaccgaaccactgggcagagcgtaggccgggctttttgtcaggcatgatcgattctcttattgtatgactatatgttctatgcgtgcttaaacataagcgcaaaatcgccgctttggaagtgttgttttgcaaatagtcatactatatagtcgatcctaactgaggtatggccctggcggatttcgtcagaggcgtcccccgagcttctataaaaacaacaatcggagatcgaccccatgagccaggaactgcggcttattcggcgcatcacgctgaaactgattcccttcctgatcctgctgtacctgatcgcctacgtggaccgttccgccgtagggttcgccaagctgcacatgggcgctgacgtgggcatcggcgacgccgcctatggcctcggtgccgggttgttcttcattggctatttcctgttcgagattcccagcaacctgatgctcgaccgcttcggcgcccggcgctggtttgcgcgcatcatgatcacctggggcgccatcaccatcggcatggcgttcgtgcaagggccgcacagcttctatgtgatgcgctttttgctgggcgcggcggaggcggggttctttcccggcgtgctgtactacatcacccagtggttcccggtgcgccatcgcggaaaaatcctcgggctgttcatcctctcccaaccgattgcaatgatgatcacaggccccgtgtccggcggtttgctcggcatggacggcatcctcggcctgcatggctggcagtggctgttcatcgtgatcggcaccccggcgatcctgctgacctggccggtgctgcgttacctgccggacggcccccaaaaggtcaactggatgagcgaggaagaaaaagcctggctcaccggcgagctgcacaaagacctgcaagcctacggccagacgcgccacggcaaccccttgcatgcgctcaaggacaagcgcgtgttgctgctggcgctgttctacctgccggtgaccctgagcatctacggcctcggcctgtggttgccgaccctgatcaagcagtttggcggcagcgacctcaccaccggcttcatctccgccgtgccctatatcttcggcatcatcggcctgttgatcatcccgcgcagttccgaccgtttgaacgaccgttacggccatctcgccgtgctctatgtattgggcgccatcggcctgttctgcagcgcctggcttaccgtgccagtgctgcaaatggccgcgctgtgcctggcggcgtttgcaatgttttcctgcaccgccgtgttctggaccctgccggggcgcttctttgccggcgccagtgcggcggccggtattgccttgatcaactcggtgggcaacctcggcggttatatcggcccgttcgtgatcggtgcgctcaaggagtacaccggcaacctggcctcaggcttgtatttcttatccggtgtgatggtgttcggcttgctgctgaccctcgtggtctatcgcttgttggaacgcaagcacgtcctgcccgtcgaccaattcgccgccagcgcccgtggcgccacacgcacttaaatccaggagaacctgcatgcgtttagttcagttcgagttgagcaacggtgagcgccgcgtcggcgtggtagaaggcaaccaggtgcgcgaagtgcgcggcgcccacagcgtgcgtgaactggcgctggccgccatcgaagccggcagcaagttgcagcaacaggtgcaagccctcggcctgggcgccagccacgactacaccgccttgttggcggaacacaaaatcctgccgccgctggaccacccggacccggcccacatgctgatcagcggcaccggcctcacccacctgggcagtgcctcggcccgcgacaagatgcaccagcaggccggcgacgacagcgcgatgaccgacaccatgcgcatcttcaaatggggcgtggagggcggcaaaccaggcgccggccaggccggtgtgcaaccggagtggttctacaaaggcgatggcagcatcgtcgtgcgcccgggccaggccttcccggtgccgccgtttgccgaagacgccggtgaagaaccggaaatcggcggcctctatgtgatcgggcatgaccgtaaaccctatcgcctgggctttgcggtgggcaacgagttctccgaccatgtgatggagcgcaagaactacctgtacctggcccattccaagctgcgcagttgcagctatggcccggagctgcgcgtgggcgaactgcccgagcatctggcgggcaccagccgcatcctgcgcaacggcgaggtgatctggcagaacgaattcctcagtggcgaggccaatatgtgccatagcctggaaaacctcgaataccaccacttcaaatacagccagttcctcaagccgggcgatgtgcacattcacttcttcggcaccgccaccttgtcattcgccgacggtatacgtacccagccgggcgatgtgttcgagatcagccaggctgaattcggcgcgccgttgatcaacggtatcggcagcagcgatgcggcatttgaacccggccaagtcacccccctttaaggagatcaacatgacccagttcctcggccacaactacatcggcggccagcgcagcgccaatggcagcatcaagctgcaaagcatcgatgccaataccggcgaagccttgccccaggatttctaccaggctaccgcgcaggaagtggacgccgccgcccaggccgcggcccaggcttacccggcttatcgcgccttgagcgccgcacggcgtgcgcagttcctggatgcagtggccgatgaactggacgccttgggcgatgatttcgtcgaactggtctgccgcgaaaccgccttgccggccgcacgcatcaaaggcgaacgcgggcgcaccagcggccagatgcgtttgttcgccaccgtgctgcgccgcggtgacttctacggcgcgcgtatcgacaaggccctgccagagcgccagccgctgccgcgcccagacctgcgccaataccgcatcggccttggcccggtggcggtgttcggcgccagcaatttccccctggcattttccacggctggcggcgacaccgctgccgcgctggccgccggttgcccggtggtgttcaaggcccacagcgggcacatggcgaccgccgaacgcgtagccgatgcgatcatccgcgccgccgaagccaccgagatgccggctggcgtgttcaatatgatctttggcggcggcgtcggtgaggcgctggtcaagcacccggcgatccaggcggtgggctttaccggctcactcaaaggcggccgcgccctgtgcgacatggcagcggcgcgcccgcaaccgattccggtatttgccgagatgtcgagcatcaacccggtgatcgtgctgccccaggcgctgcaagcccgcgccgacagcatcgcccgcgacctgaccgcctcggtggtacaaggctgcggccagttctgcaccaacccaggcctggtgatcggtatcgcctcgcctgcgttcaccgcgttcactcagcaggtcgcacaattgatcggcgagcaaccggcgcaaaccatgcttaatgccggcaccctgggcagctacggcaagggcctggaaaaactccggtctcacccggccatccagcatctggcgggcagcgcgcaatcgggcaatcaggcgcaaccgcaactgttcaaggcggatgtgcgtctgttgattgacggcgacgaagtgctgcaggaagaagtgtttggccccaccacggtgttcgtcgaagtggctgatcaggcgcagctcagcgccgccctgcaggggctgcacgggcaattgaccgccacgctcatcggcgaaccggccgacctgcaacagttcaccgaactcacgcccctgctggagcagaaagtcgggcgcatcctcctcaacggttaccccactggcgtggaggtgtgcgattccatggttcacggcgggccgtacccggcgacttccgacgcccgtggcacctcggtcggcactttggctatcgaccgtttcctgcgcccggtgtgcttccagaactaccctgatagcctgctgcccgacgcgttgaaaaacgccaaccccttgcgtattcagcggctggtaaatggcacgccatcgcgtgaatcgctgtaactgatcaggaggcttcatgtcgttgagcgcagtcaccccgcaccgtgcccggttgggcgaagggccgttctgggatgtaccgacccaggccctgtattgggtggatatcgccgcccgccaggcgctgcgcctgatgggcgggcagttgcaggtgtggcagttgcccgagcacgtctcggcgttcatcccctgtgaacgcggcgatgcgttggtgaccttgagcagcggcgtgtatcgcctggacctggccaccgaagccttgaccctgctgtgcgtagccgacccgcaagcgggcaaccgcggcaatgaagcacgttgcgatgccctgggccggctgtggttgggcaccatgcagaacaacatcggcgagcagggcgaagacctgccgattacccggcgctccggtggtttgtttcgcatcgatgccgatgcgcgggtcacgccgttgctgacggggctgggcattcccaacaccttgctttggaacgaggagggcagccaggtgcatttcggcgacagcatggacggtacgctctatcagtattcgatccaggctgacggccaactcggcgccgcccaggcctggttcgggccgcacacacgcggcgggccggatggctcagccatggacgccgacggctacatctggaacgcgcgctgggacggcagttgcctgctgcggctaacgcccttgggtgaggtggatcgcatcatcgaactgccggtcagccgtcccaccagttgcgtgttcggtgggcccgagctcaccacgctgtacatcaccagtgccgcgagtcccttggggcatccgttggatggtgcggtactggcgattgaaatggatgttcccggaaaaccctgtcaccgcttcgccggataacctgtaggagcgggcttgcccgcgaaaaacgtcaacgataacgcgttcatgctggatgggcgcgtcgccctcgggtttttcgcgagcaagctctctcctacaacgttctacctaaaaacaacaacaaggagtcacccctatgaatcgtcgtcgtggtttgcgttccctgtgctgcgccgctgtggcggtctcggccatgagcttgagcggcctgttgctggccgctgaagaagtaaagatcggctttttggtcaagcaggccgaagagccctggttccagactgagtgggcgtttgcggaaaaagccgcccaggacaaaggcttcaaactcatcaagatcgcggtgcccgacggcgagaaaaccctctcggccatcgacagcctggccgccaacggcgccaaaggcttcgtgatctgcccgccggacgtgtccctgggcccggccattgtggccaaagccaaggccaacggcttgaaagtgatggccgtggatgatcgctttgtcgatgccaagggcaacttcatggaagacgtgccgtacttgggcatggccgcatttgaggtgggccagaagcagggcgccgccatggccgccgaagcgaaaaaacgcggttgggactggaaggacacctacgcggtgatcaacaccttcaacgaactcgacaccggcaagaaacgcaccgacggctcgatcaaatccctggaggaggccggtattcccaaggaccacatcctcaccgcccccctgaaaaccctcgacgtgcccggcagcatggacgccaccaactctgccttggtcaagctgccaagcggggcgaagaacctgatcatcggcggcatgaacgacaacaccgtgctcggcggcgtgcgcgccaccgaaagtgccggtttcgccgcagccaatgtgatcggcatcggcatcaatggtaccgacgccatcggcgaattgaagaaagccaacagcggcttctttggttcgatgctccccagcccgcacattgaaggctacaaaaccgccgagatgatgtacgagtgggtgactaagggtaccgagccgccgaaatacacggccatggacgaagtgacgctgatcacccgcgaaaacttccaagcggaactgaccaagatcgggctgtggaaatgaccgctgcggccctgcggtttgacggcatcggcaagacctttcccggggtcaaggcgttggatggcatttgcttcaccgcccacccggggcaggtgcacgcgctgatgggcgagaacggcgcaggcaagtcgaccctgctgaaaatcnnnnnnnnnnnnnnnnnnnnnnnnnnnnnnnnnnnnnnnnccagcagtttatcggcgcgggaaatcgaccgcttgatggcgatcatcgcgcgcctgcgcgacgagggcaaagtggtgctctacgtgtcccatcgcatggaagaagtattccgtatttgcgatgcggtgacggtgttcaaggacggccgctatgtgcgcactttcgaggacatgagcacgctgacccatgaccagttggtgacctgcatggtcggtcgcgatatccaggatatctacgattaccgagtgcgtgagcaaggcgaggtggcgctcaaggtggacggcttgctcggcccgggcctgcgtgagccgatcagcttccaggtgcgcaagggcgagatcctgggcctgttcgggctggtgggggcagggcgcacggaactgttccgcttgctcagcggcctggagcgcgtcagcgccggtagcctggaactctgtggtgagccgttgcagttgcgctcaccccgcgacgccatcgccgccggggtattgctgtgtccggaggatcgcaagaaagagggcatcatcccgctgggcagcgtcgctgaaaacatcaacatcagcgcccgtggcgcccattccacctttggctggctgttgcgcgaaggctgggagaaaggtaacgccgaccggcagatccaggcgatgcgggtcaaaacgccgaacgcggcgcagaagatcatgtacctgtccggcggcaaccaacagaaagccatccttggccgctggttgtcgatgccgatgaaggtgttgctgctcgacgaacccactcgcggtatcgacatcggcgccaagtcggagatctaccagatcatccataacctggcggccagtggcattgcggtaatcgtggtgtccagcgacctgatggaggtgatgggcatctccgaccgcatcctggtgctgtgcgaaggcgccctgcgcggcgaacaactgcgcgagcacgcgactgaatccaacctgctgcagctggccttgccacgcggcctggcgaactgagagacgaccatgaccattcaaaacaacgcgttgccctcggcacgcaaacccctcgatatgcgcgcactgctcgataactgggcgatgctcttggcggcggtgggcatcttcgtactgtgtgcgctgctgatcgataacttcctctcgccgctgaacatgcgcggcctgggcctggcgatttcgactgtcggtattgccgcgtgcaccatgctgttctgcctggcctcggggcacttcgacctgtcggtaggctcggtgatcgcctgcgccggggtggtggcggcgattgtgatgcgcgataccgacagtgtgatgctgggcattggcgcagcgctgctgatgggcctgatggtggggctgatcaatggcatcgtgatcgccaagctgcgggtcaacgccttgatcactacgctggcaaccatgcagatcgtgcgcggcctggcttatatctttgctgacggcaaggcagtgggcgtgtcccaggagcaattcttcatcttcggtaacggccaattgttcggcgtgccggtgccgattctgatcaccattgtctgcttcctgttcttcggctggctgctcaactacaccacctacgggcgcaacaccatggccatcggcggtaacccggaagcggcgctgctggccggcgtgaacgttgatcgcaccaagatcctgatctttgccgtgcacggcctgattggcgcgctggcgggagtcatcctggcttcacgcatgacctccggccagccgatgatcggccagggcttcgagctcacggtgatctcggcctgcgtgctgggtggggtgtcgctgagcggcggcatcggcatgatccgccatgtgatcgccggggtgttgattctggcaatcatcgagaatgcgatgaacctgaagaacatcgataccttctaccagtatgtgatccgtggttcgatcctgctgttggccgtggtcatcgaccgcatgaaacaacgctgaacccaggccctatgaaaaaccaatgtgggagctggcttgcctgcgatagcggtggcacaggctacacaagtgttgcctgaaccaccgctatcgcaggcaagccagctcccacagtttaatcagcggtgaacttgaaaatagtgtgttgggtgtaagtctgccctggattcaaacgcgttgaggcaaagctcggctggttaggcgcatcgggaaagtgctgggtctccaaggtaaatccactccaatgctgataggtcttgccgcctttgcccttcaccgaaccgtccaggaagttgctggtataaaactgtacgccgggctctgtggtgtagagctgcaaacgccgccctgattcagggtcatgcacttcggcggccagctgtttcacattccctttggtatccagcgcccagttgaagtcgaagccaccctgtttcggctcggcgaatttgagctgcggatggtcgtccttgatgtgctggccgatggcggtcggtttcaggaagtccatgggcgtgcccttgaccggcgccaattcaccggtgggaatcaaggtggcattcaccggtgtgtagtggctggcgtgcaaggtggcgacctgcttgagaatatcgccgttgcccgcaccggccaggttgaagtagctatggttggtgaggttgagcaccgtcggcttgtcggtggtggcggtgtagtcgatgtgcagttcgttgttgtcgttgaggcggtaggtgacctcggttttcaagttgcccggaaagcccatttccccgtccttggacaggtaggtgagggtgacgcccaccgagtctttgtccttgaccgatttggcttgccacacctgcttgtcgaagccctgggcgccgccatgcaatgagttggggccgtcgttgagcggtacctggtagcgtttgccgtcgagttcgaaggcgccgccggccaggcggttgccgaagcggccaatggtcgcgccgaaaaacgcggtaccgccttgatagccttgcacgtcatcgaagcccagcaccacgtcgtcgagcttgccgtgtttgtctggcacttttagcgactgcagcacgccaccgtaggtgatcaccgtggcttgcatgccatggctgttacgcaacacgtactgttcgacggcggtgccgtcattggttttgccgaagggtttgtgttcgctgctaaggccggcggcgtgcgcgccaccgctggcgatcagcatggacagcgcgaggccggacagcaggtatcgagggtgcttcatggtcgaacttccttttgttgttttgctggaatagttctactaatttgagatattttgtcgatatgacagcagatttatagcctttaacgccgttcttgcaaaataaaataagactaattaagcggagcactgattgttatgactacccagcaagcgatttatcccgacctcaaggacaaaaccgtgctggtttccggcggggcttcggggattggcgagttcatggtgcgggccttcgccgcgcagggtgccaaggtggcgttcgtggaccgtgcacagagccaaggtgaacgcctggcggcgctgctgaactccaaagggcagagtgtcgagttcgagtgctgcgatatcaccgacgagatcggctaccgcgcggcgatcgggcgcttcgagcattccctggggccgattacggtactggtcaacaatgcagcgaacgatgtgcgccacagcctggaagaaatcgactcgcacctgttcgaccagctgattgcggtcaacctcaaacatgccttctttgccgccaaggcggtggtgccgatgatgaaagaggccggcggcggctcgatcatcaacctgggctcggtgggctggatgatggcctcggccggctaccccgtatacgccgccagcaaggctgccgcccacggcatgacccgagccctggcgcgggaactggggcccaaccatatccgcgtcaacaccttggtaccgggttgggtgatgaccgaaaaacaactggccatgtgggtcgacgacgccgccaaggacctcatcgcccgcagccagtgcctgcccggcagcgtgatgccggaacacatcgccaacatggcgctgtttttggcctcggatgcctcggcgatgtgctcggcgcagaactttatcgttgacggcggatgggtgtagcgacgcgaacagggccctatgtaggagcgagcttgctcgcgaaaaacgtcaacgataacgcgtgtagcctgagtaaacgcggcgtctatgagtttttcgcgagcaagctcgctcctacacattagcgcgagttcattcgatggggtaacgcttgaacgccgggtgctgctccaggcgttcagcatggcgcttgaggttggggaacgcatcggcctttaccaccgaggccacggtgaactggctgaacgaccaggcgaccgctgcggtaatcgacgcctgggtcagcgcttcattgcctgccagctgcttgtccagcaacgcataagccgccagcagttgcccggtaacgcgctcaagccacggcgcatgcaatttttcagcggggcgaaggttgtgttcatagacgatctgcacgcttttttcacaggccgccagcgcgagcccaagcagttgcaggtcgcgggcgcgtgcagccggttgttggggcagcagcttcttgtcagccggcgccagcgcttccaggtaatcgaggatcaggctcgaatccatcagcaccgtgccatcgtccagcatcagggtcggggccttgactaccgggttgatctgggcaaattcagcgtaagtgctgaacaccgaaagcggttcatgaacaaagtccaccccgtataactccagggaaacagccacgcggcgtacgtagggcgagtccagcattccgaccagtttcatgcagcctccattgcttacagggtgttgggctcacgagattaagggcgcgggcctggattgcgcaacggcgttgtgcagcagccgatacgcctgcaccaattgatcgaggctgaacgccaggttgcgcccgctggggttgggcagcacccagaccgaggccccgcccagtggctgcgcttgcaaaccccaggcgacctcgcgctggccgctcagcgcgctatagccgggcttgccgaggaacgcgacgaagcgcggggcatggcggcggatcttgtgttcgaacgccgccgccgcgtcctggaactcatgccgcgccaactcgcctgcactggccgttggacgtgccaccaaggtggtcaatccgcaaccgtagtgcagcaaggtggcaccgtcttgcgggcggatttcatggggcgtgaaaccggccaaatgcacggtgcgccagaagcggttgctgcgattggcaaaatgcaggccgagggcggcggagcccttgccagggttgatgccgcagaacaggacatgcaagtggtcggcgaggaggtcgtcgagtcggtcgttcatgccgcatctccctgcaaatggctcgatagccactcgataaaacaccgcgccagggggtcgttctcgctgtcgcgatgggtcagtagcgcccagctggggccgcgaatggtggcgtctaccaacggcgtaagcaaacctttggcttgcccctggcggctgagcaactggcttaccaggccaatccccaacccggtgcacaccgcatccagcaataaaccggggtcggaaaaattcaggccctggtcctgttggcccacatcaatcccggcttccaccgcccagtggctccagtccatttcccgctcaccgtgcaaggtggtgcgttgctcaagaggcacctccagcacctgcgggtggcatgccggaaacagccggtcgatatgcagcaccttgaagctgcattcggcctgggagctgatgtcgtcgcgcaccgccaaatcgatggtctggctggccatgtctggcacttcgtcggtgctgaaaatccatagatcgacctgcgggtgttggcggcgaaagtcggccaggcggggcaacagccaatgccgggcgaaggtcggcgtggtgttgagcaccaattgattgggtttgcggtattgcccaaggcgccgcacgccgacggccagttgttgcagtaaggcctgggtggtgctgaggaaatcctggccggcgtcggtcaagctgacgctgcgcccgctgcgaaaaaacagcggctgttcaaggtacgcctccaggctgcgaatctgctggctgattgccgattgggtcaagtgcagctcttcggcggctttgtgaaaactgcccagccgagcggcggcttcaaagccgcgaagggtgccgaggggcggccagtggttgagcatgctgataagttcctctaatcagttttgcgcaaaattcatcgtttgtttgcgctatttcttcaccgtagcatgcctgtcattagcccgtgggtagctttcactgaacacaatgacttaactcaaaggtacttgtcatgcagatggatgaagttgaaaacctggggtggcggatgcccgcggaatggtgccggcatgcggcgacctggatggtctggcctcataaccaggcgttgtgggagaacacttggggcgtgacgttggcgcaggtgcagcaggacttcgcgcgggtagccactgccattgcacgctttgagccggtgaagatggttgtcgacccttcggcggttgccagtgccatcgccttgtgcggcccgcggattgaactgattccccaggcggtcaacgacagctggtgccgcgactccggcccgtcctttatctgtcacccgcaacaggggctggccggtgtgagctggcgcttcaatgcctggggcgcaaagtcggcccatgaatgggatgaaagcctggcccgtcgagtgctcaatcacctcgggcttgtctgcttcggcatgccgttgagcaatgagggcggtgccctccatgtggacggcgagggcaccttgatcaccaccgaatcggtgctgctcaatcccaaccgcaaccctggcgtgaccaaggctgacatcgaggaggtgttcgcgcgctggctgggtatcaagaagacgatctggttgcccggcgacccgaactacgttaccggcgacatgacggatgggcatgtcgacggcatctgcgcgttcgcccgccccggcgtgttgctggtggacgcgacccacgaccacagctcggtctatgcccaagttgcgcgggaaaatcgtcgcgtcctggaattggccaccgacgctcagggccgtcgttttgagctgatcgagctgtatgaggctaccgaggccgtgaacactgacgccgaggtgttctgcgcctcctacaccaacttctatatcgccaatggcgcaatcatcatgcctgcctatggaatcgccgcggatcaggtcgcggccaatgtcctgggccaggcttttccggaccgcgagatcgtaccggtgcgcatcaaccacctggcccatggcggcggcggtgtgcattgcatcacccaacaacagcctgcctggccattgaaggggtaatgccatgcgtctattgacgattgccactacccagatgccttgcacctgggatttaccgagtaacctcgaccgcgccgagcaactggtgcgcgacgcagccgccaagggcgcccaggtaatcctgttgcaggagctattcgctacgccgtatttctgcatcgaacaacggcatcagcacctggccttggccgaggagtatcagcacagccaagtgctcaaacgctttgctgcattggccaaggagttaggcgtcgtgctgccactgagctggttcgaaaaagccggcaaagcgttctttaactccctgagtgtggcggacgctgacgggcgattgcttggggtgtaccgcaagagccatattcccaacgccatcggctaccaggagaaggaatattttagccccggtgacaccggttttcgcgtgtgggacagcgccttcgggcgcctgggcatcggtatctgctgggaccagtggtttccggaaaccgcgcgctgcctggcattacagggcgccgaggtactgctgtttcccaccgccatcggttcggaacccggctgtgccagcctcgattcccgcgaccattggcagatgaccatgcgcgggcacgcggcggccaacctgctgccggtggtggcggccaaccgcgtcgggcgcgaagtggcgaacagtaatgcgagcctgcaaatggatttttatggttcatcgtttatctgcgatcacaaaggcaagctgttggccgaagccgaccgcgacagcacgggcgtactcgtgcacagcctggacctggccaccatgggcgaagagcgcctgacctggggcatataccgtgaccgtcgcccggacttgtacggtgcgctgctgaccctggatgggcgcctatcatgaaacgcctgttgagctgtgccctcatcctcaccagcgcctgtgccgtggctgatgacaagaccttgaagctgtataactgggccgattattttgcccctgacaccttgtccaggttcaccgccgaaaccggtatccaggtgatctacgatgtgatggacagcagtgaaaccctggaagccaagctgatggccggaggcagtggctatgacttgatcttcccaggcgacacagtggccgagcgcctgatgcgtgccggcagcctgcaggccctggaccctgccaggctcacggccctgggggacattgaaccgggcctgcaggcgttgcgtgcgcactacgtcaattcaaacaaggccacggtgccctatacctggggcaccatcggcctgacctacaacaccgagcagatcctccagcgcctgccgaacgcgccggtcaacagcctcgatctactgttcaagcccgagtttgccgcccaattcgccgattgcggcatctccctgattgactcgccggatgaagtgctcgcggtggtgcttaactacctgggccgcgacccgcgcagtgccaagcccgaagatctggctgcggccagtgcactgttgctcaagctgcgcccctttattcgcaagttccagtcgcaaccggtgaccgatctggtcaacggcaacctgtgcctgtccctgggctacagtggcgacatgacccaggcccagcgtgccgccgatgcggccggcaaggcggtgaccttcggctatcacatcccccgcgagggcacgacagtctggatggacaccatggcgattcccgtcgatgcccggcacccggaatacgcctacgcttttatcaactttgtgatgcgcccgcagaacatggccgctatcaccaacctgaccggctatcccaccgccaatgccaaggcgcgaccgcaggtggaggccagtctgcgcgacaacccggatatttacccagatgccgccacctttgaacggttgatcgctggcaaagatatcccccaggccgatatgcgtgcacgtatgcgcgtatggactaaattcaagaccgcccctcttcagtagagacccccatgccaacccgtcgaaccttcctcaaacacaccagcgtggtcgcagcgatgagcctgattgctccttacgtacgtgccgctgtcagtggccgcttctatatgcccgacgagggtgaaaaacaccgccaggcgtttatcgcctttggtgcccaggaggccatctgggaggactttaccgccgatgttcaagcagcgctgggccgtatcgcccgggcgattgccgagtatgagccggtgaccgtgttttgccgtggagacgagcgggtgctggcggaaaaacattgcggcacgcgcaacatcacctttgtcgagaccgagctggacgacatctggatacgcgacaccggcgccaatttcgtgattgatggcaccggagcgctgggggcggtggatttcaacttcaacgggtggggcaacaaacagcagcacgccgaggatgcgcaactggctgcccagattgccgaacacactggggcccgctactggcgcagcgaactggtgggcgagggcggtggcattgaagtggatggcctgggcaccggcatcatgacgcaaagcagttggatcaatcgcaatcgcaaccccgactggagccaggctgaggtggaggccgaactcaaggagcgcctgggcttgcgtaaaatcatttggctgccgggtatcaagggcaaggacatcaccgacgcccacgtggatttctacgcacgctttgtgtctcccggcgtggtgctggccaatctcgacaccgacccgcagtcctatgaccacaaggtcaccctggcacacctggaaatgctcaagaacgccaccgacgccgatggtcgcccgttgcaggtgcataccgtatcgccgccgctcaagccgcgtaaaagcaagttcagccaaggcaacccggatttcgccgcgggctatatcaattacttcgtgatcaacgatgcggtaatcgcgcctgagttcggcgacccactggcggaccgcaaggcgctggagctgctgtcgcggctgtatccgagccgcaaggtggtgcagatcaatattgacgctatcgcagcgggtggcggtggcattcactgtgtgacgagtcatcaacctttggtttagtctggaacgcttcgttgatcacaagcgcctctggagcattgattatgaccgagtacgtacctgccaaagtctggacctgggacgccgaaagcggcggcaccttcgccagcatcaaccgacccatcgccggcgccacccacgaaaagccgctgccggtgggcaagcacccgctgcagttatactccctggccacgcccaatgggcagaaggtcacgatcctgctggaagagctgctggccctggggcacagcggcgccgaatacgatgcctggctgatcaagatcggcgacggcgaccagttcggcagtggctttgtggcggtgaatccgaactcgaagattcctgcactgatggaccacagcggcgccacgccgattcgcgtgttcgaatcaggcgcgattttgcagtacctggccgagaagttcggtgcgttcctgccaacggagcccgccgcccgggctgaatgcctgtcgtggctgttctggcagatgggcagcgcgccttacctggggggcggctttgggcatttctatgcctatgcgccaagcaagatggaatacccgatcaaccgctttgccatggagaccaagcgccaactggatgtgctggataagcgcctggcggtcagccaatacatcgccggggatgaatacaccattgccgacatcgcgatatggccttggtacggtgggttggtcaaaggccgtttgtatggcgcggcggattttttgtcggtgcatgaatacaaacatgtgcagcgctgggcggatgcgattgacgcacggccggcggtgcagcgtggacggcgggtgaaccgggtgtcgggcgatgatcagttgcccgagcggcatgatgcacgtgacctggattgatacgataaccaggtaggagcgagcaagctcgcgaaaaacgtcaacgataacgcgtgtttcctggatgagcgcggcgtctgggcgtttttcgcgagcaagctcgctcctacaaagctgcgttatttgtagcgctgctcaaacacctccacctgctcaggcgtgatcagctcaaatggcacccacacctgtgcgtcaacttgctcgcccttgatcatccgcaccgccgcttgcacggcctgggcagcctgggccttggggtcctgaaacactgagcccgccaacaacccgcgcttgatcgccgccaggccatcgggcaagccgtcgatgccgacaatcgcaatctcgcccttggccttgcccgcttgctgcaaggccatggccgcgccaatcgccatttcatcgttgttggcgacaatggcattgaacgcggtgccggccagcaaccagttactggtcaggtccattcccttgctgcgctgccattcggcgctttgctgctcgacgaccttgatccccgggaagtccttgagcacctgtttgaccccctcggtgcggtcatgggtggcgttctgtgcaaggtcgcccatgatgatcgccacattgcccttgccgcccagtttttgtgcgagatagcgcatctgcaattgccccgcttcgatgtcgttggaggccaccgtaaccacgccctcaggcagcgtacgctcatccgggtggcggttgacgtacaccagcggcgtcttcgccgccacggcggcgcgggtgatgttggcggtggcagcggtgtccaccggcagcacgatgaccgcatcgactttctggttgagaaacccttcgacctgattgagctggcgcaccacatcgccctgggcgtcttcgaattggatctgcacgtcctggtgtttcgctgccgcctccaggccggtgcgcacataggtcatgaagttatcgtccacccgggcaatgctcacgccgatgcgataggcagcgaaggaccactggctgaacatcaataacagcgcggccactagtaatgaataacggtgcatgaggctgttccttttattgttatagggtgaatgcctggcggaaacgctccagggccgtctcgctgtcgccgctggcccagccctccaggccgaccacaccggtgtaacccatggcgtgcaaggcccgggcaatggccgggtagtggatctcgcccgtgccgggctccttgcgcccaggcacgtcagccacctggatttcgccgatggcgctgccagcgcgctggatcaattcgatcaggttaccttcgccaatctgcgcgtggtacaggtccaggttcatcttcaaatgcgggctgccgacggcttcgatcagggccagggtgtcgtcggcacgtgcaaacggtgtacctgggtggtcgacggcggtgttgaggttttccagcaggaacacgcggccggcgtcttcccccaggcgcgcgattttctccaggcttttgcatgcgctcagccacatgcgcccggtggtgtggctgacgggctgcacgggcaggccgccttcacccaggcccgtgccatgcaggttgaggcaggggcaattgagtcgctcggcaatgcccagcgactcacgggcgctgtcgagcaattggcggatgccgtcggggtcggtgagggtgccgctgaggtagccggtcatcgaggtgaagtccgcgcccgtcgccgccaaggcgttgatgtccttgtcggcccaactccagatttcggcgctgaagcccagggcatgaatacgtttaacgcgttcgatgaaaggcaggtcgaggaacaccatttcggcgctgacggccaatttgaacggcatcatcaaagggctccttgaacggccacggccctgccggtttggtacgactcaatgcaggcacgggcaattgccagggctgcacgcgcatcttcaccgctggccaggggcttggcgccgctgcgcaggcagtcgacaaagtggttgagctcggcgatgtaggcgtcgcgcagcaggtcggtgtccatccgctgggtgtctgcctggatgccctcggccaggtagcgcaccaggtcgcagtcgttaaggctgcccatgctcagcatgcccttgctgccgaacacttcgccgcgcacgtcgtagccatacacggcctggaagctggcttcggcggtggcaatggcgccgttgtcaaagcgcagggtgaccacggcggtgtcgagcaagccttggcttttgaattgcggggcaatcagcgcgtcggccatcacctgcacctggaccacttcggccccagggttgagatagcgcagggtgtcgaagtcgtggatcagggtttcgaggaagatcacccattgcggtgagttggccgggttgttcagcgccgggtcgcgggtcagcgagcgtagcagctgtggcgtgccaatacgtccggcgacgacgtcgaggtgcgcggtgcgaaagctcttggcgaagcgccgattgaagccgacctgcaagggcacccgtgcatcggcagcggcggcgatggcgcggtcggcttcgtccagggtaatcgccatgggcttttcgcagaagatgcccttgccggcacgtgcggccttgatcaccagctccgcgtggctacgggcaggggcggcgataagcacgccgtcgatgtccgggtcgtccagcagctgttgcgggtcggtgtaggccttgtccacccccagttccgctgccaggcgagcggcctggcctgggacgggatcggcgatggcggcgaggcaggcaccggggatatggcgtgcagcggtaaggccatggaagctgcccatgcggccggcaccgatcaagcccaggcggatgttctgtgtactcatgaaacgaccccttttgttgttgtgggcccccaggacagtcctgggtgacacaggggcaggagcaaggcgtgtgccaatttataagtggttgatttataaaggcttattattttaatcaaacaaaaagtgttcatttttatgacatgtctatactgacatgtcgaaaatatggacatggataaccgcaatgacccaggcgttcagtgtgcaagacctcgaatacctcacgaacctggggcctgccgcgctgaacgacgggcccatcgccgcgttggaacaggcgtggcgagagtgcctggctggccaagtcgtgcgtcccgacggggtacgccaggtcatctgggattcctggcgacgcagtgtcgaggcgggtatcgagcccggtaacaacgactaccgctttgttgcgcctcatgcgctcgcggcgaccctggcccaccatcgcgccctgatcgccgccgccgcgcaggtcatgcatggattgctggcttacaacccgcgcgggcatatcaacctcacggacgccgatgggacgaccttgtacttctgcgggctggacatcaccccggtgggcagtcgcttgctcgaatcggtgcaaggcaccaactgcaccggcctggccctggccgaagatcgcctggtgtatgtgctggcggaagaaaatttcgccagcggcctgcgccagcgccacatgcactgcgccgccgcgccgatcaaggatgcccaaggccagaccctggccatgctcaccctgaccgccgagcccggctggtttcacttccataccctgggcaccgttcaagcggcggccgaagcggtgtcgcggcagatggcgctgcagctgttgctggaagaacaacaggccgtgctcgaagtgctcaacgaaggtttggtggtgctcgatgagcgtggctgcatcaaggcgctcaaccgttatgcgcggcacctgttcggggtggggcgcgagttgatcggcagtcctttccagcgcctgggccgcagtgaactgagcgacgcgctgggtgagcctgtgcgcgacctcgattgcaccttccacctgcacgacggcagccaactcgcctgcctcgtttcgctatgtccactggagcagggtggggtgattgtgtcggtgcgcgaaaaccgccgtatccgcgagattacccggcgcattatcggcacccaggcccgctataccttcgagaccatcctgggcacctcacgggcgatacaagacgctctgcacctggggcgcattgccagtcgcagcgagtccaccaccttgatcctcggcgaaagcggcaccggcaaggaactgtttgcccaagccattcataacggcagcgagcgttgtaacggtccgtttgtggcggtcaactgcggcgcgatcccacgggacctggtgcaaagtgaactgtttggccacgtcgaaggcgcattcaccggctcggcgcggggtggggctgcaggcaagttcgaactggcggatggcggcaccatcttcctggatgaaatcggcgacatgtccttcgacgcccaggtcagcctgctacgggttttgcaggagggtgaaatcacccgcgtcggggccaagcaatcgcggcaagtcgacgtgcgcatcatcgcggctacccatcgcaacctgagccaggcggtggccgagggcgcgtttcgtgaagacctttactaccgactcaacgtgctgaacctgagcgtgccgccactgcgtatgcgccgtgacgatatcccactgctggcgcgccacttcctgcagcgctgtgcccgctcgctccgtaaagccgtgcaaggtttcaccccggatgcgttggcgttgctgtcagcccatggttggccgggcaacgtgcgggaactggagaacgtcattgagcgggcgaccaacctggcgatgggcgagctgatccaatcggctgatttgccgttggaaaccccgcaacgcaccacgttgcgcgcctaccagccccagcccgcgcaggatttgagcagccatgaaatgcacgccatcgttgccgcgctcaccagcacccgcggcaacattcgcctggccgcacagcaactggatgtgtcgcggggcgggctgtacaacaaaatgagtcggtttggcttgagcgccgccgatttccgtgagcgctgaaacctcaagccaaaccgatcagttgcacaggttttccgacgtcactatctgcggcggtatatgcacgcggtgcttcaaagggtcaaacccctcatcactctgcaagcgcaccagcaactccaccagcgccacggccgtctgccgtggctgcgagtccatcaccacatcaatcaagccgttgctcaatgcctggcgtgacaacggcgtggactcttgcaggatgcagcacagcgccgggcgcttgggcagttgcgccaaggcgttgatcacaccgtcgccacccccgccgaccacgcataacccacgcaggtcggtatgacggctgagcaggtcgagggtggcttcttcggtgatgtcgcagttgtccaggttgatcagcggctccaacggcttgagccccggcgcgtgttcggccaggtagctgtgcaaaccctcgacccgtgcctgatggccgagaaaacgatggccgcccaacaggatgcccacgctgcctttgcgtgcgccgcaggtgcgcgccagcagccagcccatggtgcgcccgaccacgtggttgtcctggcccacatagggttcggcggcgtgttcatggatgtccgagagcagggccaccaccggcacgcccgctgtgcggatctgcgccaggcaggcgttgatcaatgggtgggcgaagctgaccaccgcgagggcgtcacactgcacggccagttgttcgatttgcgcgacgatggcgccgggcgtgcggtctttgatgtagtcgaactggcagctcaggttggcggtggcgtgatgctgcgctgcctcgctgatggcgtgggccaactgcgcatagaacgcttgggcggtccccagcaacagcacgccgaaacggtaggtgggccgacgttcgcgaatgcgctggccgatcagccgtgcggcgaaatagcccaccgcttcggcagcctggaacacctgttcggccgtgccggggttgaccggcgcgcgggcgttcaacacgcggtcgacggtggctacgctgagccccgcatgggcggcgacggtggcgatggttgggcgtttgttgttgtgcatggcaggccccttgagcgtcttgatagaaaactatcaagccccgctgggcctggatgatagcttgatagggaatggattcaaggccttgagggtgatttagccgcgctctatcgttggtttcgcaaagcccctgaaacccacgcttgcggagaacaataacaatgcctggacacaccgctcaccgcgctcggcgcgactacagcctcaccggccccgaagcggcccgcgccgccgacaagggcctggtctcggcccgttggtaccagtcgcccatcccgcgcaatcgcatgaaagccctgatgcaacgccgcgacgctccggctttgctcgacaccgccctgtggtgctcgacgttgttggccaccggtgtcggcggctactggttctggggcagttgggcctgcgtgccattctttatcgcttatggtgtgctctacggcacggcctccaacccgcgctggcacgaaaccggccacggcacggcgttcaagacccgctggatgaacgatgcgctgtatcaggtggcgagcttcatgtgcctcttcgaaccccacgtgtggcgctggagccatgcccgtcatcacaccgacaccatcgtcgtcggccgtgaccccgagatcgtcgaaccgcgcccgcccagcttatggatgatggccctcagcctgttcaacctgcccctggcctggaagaccttcagcggcgtggcccgccatgcgctcgggcggatgagtgcccaggagcgcgacttcatccccgaatccgaatggcccaaggtgtaccgagatgcgcgtatctgggtcggtctttacgctgtgatcattggcactgcgctgtacctgcacagctggttgccgctgatgctggtgggcctgcccagcctctatggcgcgtggctcggctacctgtttggcctcagccagcacgtgggcctggccgaagatgtgctcgaccaccgcagcaattgccgcaccatctacatgaaccgcgtgctgcgctttatctacatgaacatgaactaccacctcgaacaccacatgtacccgatggtgccgtaccacgcgctcagccaactgcacgaagagatccgcagcgactgcccgccgccgtatgccaacctgtggcaggcctaccaggaaatcattccgacgatctggcgccagcgcagcgaccccagctacttcgtccaacgccccacccgtggcgagcaagctcgctcgccacagagtgaaagccagtcattggagataaatgcatgaacgatcaatggatcgacgtctgcgccgtgggcgaaatagaagcagaagacgtgctgcgcttcgaccacggcgcgcagacctacgcggtattccgttctgccgataaccaattcttcgccaccgccggcctgtgcacccacgagaaaatccacctggccgacggcctggtgatggaccatgtgatcgagtgccccaagcacaacgggcgctttgattaccgcactggcaaggccctgggcgcgccggtgtgcgtgaacctcaagacctaccccgtgcgggtggatgcggggcgggtgcagctcgccgtcacggccgaaggatgaacgcgcccctgatcatcgtcggcgccggccatgctggtggccgtgcggcactgactttgcgtgaagaaggctacagcgggcgcttgatcctgatcggcgatgaagcgcatctgccctacgagcggccaccgttgtccaagggtttgctgcaaggctcgaccgacctggcgcaatgcagcctgtgcgacagccaccagtttgcggcgctcggtatcgagcatatcgctgccaacccggtcagccgcctggagccccagcaccaccggctgcaactggccgacggccagtggttgagctatgccggcctgctgctggccaccggaggccgggcgcggcgtttgccccaagagcaggcgaatgtcttttatctgcgcacccacgatgaagccttggccctgcgcgatgggctgcgtcctggcgctcggctggtggtggttggcggtggatttattggcttggaggtggcggcgacggcgcggggcctgggctgcgaggtcacagtgttggaagccgggccacggctggcagggcgggtgttgccgccggtgatcagtgaggcgctgctggcattgcaccgtgaacaaggtgtggacgtgcgtttggacgtcgccctggagtgcatccacgccgacgccgtgcaactggtcgacgggcaacggctgccctgcgacctggtggtggtcggcatcggcatgcagcccaacatcgagttggccgcagcggcaggcttggacgtcgggcagggcatacgtgtcgacgcgcacctgcgcaccagtgcggcggatatctacgcggcgggagacgtgtgcgagtttcgcctggagggcctttatcaacggcaagaaacctggcgcaacgccgaagcccagggccgtctcgcggcgttgaacctgctggggcgggcgttagcgtacgagacgatcccgggtttttggtccgatcaatacgcgtggggtttgcacaccgtcggggtgatggcggcactgacggttcgccgggatttgcccgacggtggtctgctgctgttctaccttgacgaccatcaccgtttgcagggcgcctgcggttgggccttgggtaaccgcgcagccaaggacatcaaactgtgcgagcgcttgatcaccgcccacatcccgctcaacccggccagcctggccgaccctgacgtctccctgaagcaactactgcgaggctgacatgcgccagtttttagtattccaatcgatgtgggccatgcaaaccgagcccggcagcctcgaagcacaactggatcgaatcgctgccgccggttttgacggcatcaccgaccattactgggccccggcatcggtgcagcgcctacacgcggcggccacggccaggggcttgcagattgaagggcaactgttcccacaatcggtggatgatctggccagggcattggaggtgatcagccgttacggctgtcaccacctcaccttgcaagccgacgtgcgcccgcgtacccaggccgaggcggccaggctgatcgacggctggcaacgcctggccgaacaggtggacttccagattttgctggaaacccatcgctatcggctcactaacgatctgctgttcaccctcgacttgctggcacagatgcccgatttgaaactgctcgctgacctgtcccactacgtagttggccgcgaattgcccgagcccggcagtgtggaagacgacgaacagatacgcaccatcttgcgtcacagctggggctttcatggccgcatcgccagcagtgagcaggtgcaggtaggcctggattttccccagcatcagccgtgggtggagcgctttaccggttggtggcgctacgggatcgaagactggctggcccgcgccgagacaccccagagcctgtccttcacctgcgaactgggcccgccaccttatgcgatcactggcgtggatggtcgcgagctcaccgatcgctgggccgaggctttgaagctcaaagcgctgattcgccaggtgtgggccagttgtcagggatgatctgctaacctgccggggttcaaaccgaccttagccagtggatcgccttcatgaaaacctgccccgtccgccccccgctcgaaccgcaatcggtgtgccatccgatcaccagcagcgcgatcttcatggtcgccaccctggcgcccgatgcggttgaacacgtgcgggcctggtgcgccgacatcgcaggcctggtgcgctcggtaggcaagcgcgtgccctcgggcaacctgacttgcgtttgcgggtttggctcggatgcctgggaccgcctgttcggcgcgccgcgcccggcggccttgcatccgtttcgcgagttcggtgtgcaagggcgcaaggcggtgtcgaccccaggcgacatcctgctgcatatccgtgccgagcagatggacctgtgtttcgagctggcggcccaactgatgacggccctgggtgatagcgtgaaagtggtggatgaggtccagggctttcggtacttcgatatgcgcagcatcatcggtttcgtcgacggcaccgagaacccggtggggcgcaaggccgaggcctttaccctggtaggcgatgaagaccctgagttcgaaggcggcagctatgtgctggtgcagaaatacctgcacaacatgaccgcgtggaatggcttgacggtggaggctcaagagaaggtgatcgggcgcaccaaattgtcggacatcgaactggacgaagacgccaagccgagcaactcccacagcgcgctgaccgtcatcaccgacgagagcggcgaggaagtgaagatcctgcgcgacaacatgccctttggccgccctggcgcgggcgaattcggcacttatttcatcggctacgcacgctcgcctgagcccctggaacagatgctggaaaacatgttcgtcggccgcccggccggcaactacgatcgcttgctcgacttcagcacggccgtgaccggcggcctgttcttcgtgccttcggccgacttgctcgaagcgctggccgaccgcgaaccggcggcttaactcaacaatccggtgctgaccgccacaatcaggaagatccccagcagcgcacggtagatcacgaacggccaggtggagaaccgttccagaaacttcatcaggccccagatcgcgaagaacgccgagacgctggccaccaccaggccaaagatcaagtgcggccaggcgtggacgggcaggtcggcgcgcagcagcacccacaactctttcaagccggccagggcgatggccggcaagcccaacaggaaggaaaaacgcgccgcctcttcgcgtttgaagttcaggaacagcgctgcggtcaacgtagagcccgaacgcgatacgccgggaatcaacgcgccgatctgcgcgacccccacgatcagcgcatcgcgcaagcgcatctggcttacgtcgcgggtatggcgggcgcgcacttccgccagggccagcaataccgccatcaccacgcaggaaatgccgatcaccatcagcccgcgcaagggtgagttgcacgcattcaaggtcgacgacaacgccaggccggcgatgccaatcggtacggttgccagcacgatggccaccgccagcttgagccagcggtcgttgtagtcgccccggcgcaccgcactgatgctgcccgtggtgacctggcgcacatcgcgccagaagtaactgaccaccgccgccaacgccgccaattgcatggccgcagaaaacgccgagccggggtcttgccagccgagcagggcgggcaccacgcgcatatgggcggtggacgacaccggcagcaattcagtaatgccctggatcacgcccaggatgaagatctgcaggtaatccagggaggcaaagcccacatccaggccggcggtacagacgttggtcaaaatacgtgtccttgagcaatagggagaaaccggcgaagtttattctaaatgtttcagaatttcggccagggcaactgctatttgcaatcggttcagccaatagaaaggattcgccaggccattggcgtgggcagcacttttgtgaacaatggcgccctgcgtttttccaccgagagccccatgcctgaaaccaccgtcgaattgatccagaccggccccgaagaagccgaactgatccgcaatctttaccagtattacgcctacgagtcttcggactgggaacaggaagatgtcgaggccgatgggcgtttctacatccacgacgaacacctggcccgctactggagcgacccgcaatggagcgccaacctgctgctggtagacggctacatcgccggtttcctgttgatcgaaggcagcgaactaccgggcatcgacgccctggaactggccgacctgttcatcctcaagcgctaccgccgcaagggcatcggccgcgccatcgccagccaggtgctgtgcagcggcgagcgcaattggctggtgcgtttctatgatcaggacgaagtgtcccaggcgttctggcgcacggtgctggacaacctgccgcgcccggtgcagagcattgaacttgacgatgagccgcaattggtgaactacctgattacccgggcttcgttgcattgacgggcgggggctttctccatatctaaacaacgctgtagcgatcaacggtaaccacgatgcgaagcgagccgctcttgatcttgctcttgatctgcttttgatcttgatctcaggcgccccgttaaaccacgctggccggaattcgacagggatttggggggtaaaccggcagggatgccggcggattacgggcacaccgagcctaagcgaggtgccgagtggtggggcaagagcccttttggttacttttggctgggccggcattccgggctcttttccaaaagtgacccgctgtcagagcggaaccctaagtggccgttaccgcaggaatggatnnnnnnnnnnnnnnnnnnnnnnnnnnnnnnnnnnnnnnnngtaaccacgatgcgaagcgagccgctcttgatcttgctcttgatctgcttttgatctcaggcgccccgttaaaccacgctggccgaacgcaggcttgaattcgtgggtaacccggcaggacgccgggttagccgccccgcgccatggatggcgcgtggcggcggcccacggattcaagcctgtgttcgggcacaccgagcctaggcgaggtgccgagtggtggggcaagagcccttttggttacttttggctgggccggcattccgggctcttttccaaaagtgacccgctgtcagagcggaaccctaagtggccgttaccgcaggaatggatatgtacacggtccaactgtgccgcctgccaggccgccttcgcgagcaagcccgctcccacagtttgatcgcagggtgtcaggtaggtaagtgttggctggtaggccgccatcgcaggcaagccagctcccacatttggatcatgggacttcaggtagataggcgccggctgtcaggccgtcacgggcctagcccgggttgaacagcacctgctgcatcgcctggggcggctgcccgaaggccctgagaaatgcctggcgcatacgttcgcgatcaccaaacccggtttcgcgcgccaccacttccaccgggtgccggctgatttccatcatcgcccgcgcagcttccacccgcagggcctcgatagctttggccggggtctgcccggtttcttcgcgaaacacccgactgaactggcgcgggctgagccgggcaacgtcggccagggcctccacggataaatcctgcgtaagattctcgcgagcgtaagccagggccaactgcacgcggtcggacttggggtccagctccaacaaggccgacaattgcgactgctcgctgccccgacgttgggcaatcaccagcttgcgcgcaatacgccgggccaggtcgctgcccaggtcgtcctccaccatcgccagcgccaggtcgacccccgcgctcatgcccgcaccggtccacaccttgccgtcgacaatgaacaacttgtcttcttccaggcggatatccgggtagcgcttgcgaaatgccggcgcatggatccagtgggtggtggtgcgcttgccagccagcaggccagcctcggccagtacaaagatgcccatgcataacgacgccactcggcgcgactgcgcggacgcggccttgaccagctccagcaggttggcctccggcaggcgaaactccaggtagccactgacaatcagcgtgtcatagccctctggccgcagcgcactggtgttcaccgaaaagccctgtgaggtcatcaccgcgccgccgctttccgacaccaggtgaaactcataggccggctcgccgcacagcaggttggcgcactcgaacaccgagcccaggctgaggctcaacgactggaaattcgggtaaaccatcagcgcaacgctgtgcattgcatctctccaaggggcgggggagaggcgattgtcggcgcgtgcccggcaaacggcaaccgactttggtgcatgtccgcaatccttgcggatatgacattgtgagccaatgcctggctgcctaacatggggccaactgttattcacaccgatcgaggcactggaaaatgaaagtattaatggtactgacctctcacgaccagcttggcgataccgggcgcaagaccggcttctggctcgaagaattcgccgcaccttattacgcattcaaagacgctggcgccgaggtggtgttggcttccccggccggtggccagccgccgctggacccgaaaagcgatgaaccggatgcgcaaaccgagcagaccgagcgcttcgccaaagacccggctgcgcagcaagccttggcgaccaccgtgaagctggactcggtcaacgccgccaacttcgacaccgtgttctacccaggcggccacggcccgctgtgggacctggcggagtcgccggtgtccatcgcgctgatcgaagccttcgagcgggccggcaagcccatcggctttgtgtgccatgcaccgggtgctttgcgtcacgtcaaggcggttaacggtgagccattgatcaagggccgccgcgtcaccgggttctccaactcggaagaggccgccgtgcagttgactgaagtcgtgccgtttctgattgaagatgaattcaaaaaactgggcggccagtatgagaagggcgctgactggcaatccttcgtcctcgtcgatggtttgctggtgactgggcaaaacccaggcagctccagcgaagtggccaaggccctgctgacactctgcgcttaagttaatccactgatttatacggtggcgactcccaggagtcgccacggttttcgttcgtcctgaatttggaatatctccgtgcctgactgcatcctgaacaccccgatcaagctggggcatcaccgcttgaacaaccgtgtcgtactcccgccgctgacccgccagcgcagcgcccagccgggtaatatcgccaccgacctgatggccgagtattaccgtcagcgggccagtgccgggttcatggtcagcgagggtacgcagatcgaaccccggggccagggctacgcgtggacgccgggcatccatacaccggcgcaaatccagggttggcgcaaagtcaccgcagcggtgcatgccgagggtggggtgatctttgcccagctatggcatgtggggcgggtgtcccataacgcgctgcaacctgacggtggtgcgccggtggggccgtctgcgctggcggcgttgcaagccaaagccttcattgaaaccgggccgggtgtgggtgaactggtacagccccccgtaccccgtgccttgaccacgctggaaatcgaagagctggtggggcactacgcccaagctgcacgcaatgccctggacgccgggttcgacggtgtggaaattcacgcggccaacggctacctggtcaaccagttcatctcggcccattccaacctgcgtgaggatgagtacggcggctcgctggacaatcgcctgcgcttgctgcgcgagattgtcgaagcggtgtgcaaggtggtggggccggagcgcctgggcgtgcgcttttcgccgctgttcagtggcaccgatcaggaccgggtctacatcggcctggtggaggaagacccgcaccatacctatatcgaagcgatcaaagtgctggaagcgtcgggcatcgcctatgtgtccattgccgaagccgattgggacaacgcgcccgacctgcccgacacattccgccaggccgtgcgccgcaccttcagcggcaggatcatctacgccgggcgctacaccgccgagcgcggcgcacggctggtagaggccgggttggcggacttgatcgcctttggacggcccttcatcgccaacccggacttgccccagcggctgttcaatggctggcccttgaatgcgttgaaggccgaaggtttgtatggcggcacgcaggcggggtatgtggattatccggtgtatgcccaacagctttgatagcccatgatggcctgtgtttgatccagtgtgggaggaggcttgccctaacgccgatcagttaaatgaacgcaatgctcgaagcaatgaagatcaaatgtgggagctggcttgcctgcgaaagcgggcgtgcagtaacagatacagtgactgacacaccaccttcgcgggcaagtcgaatcgcctcactccacccgcaacacaatcttgccgatatggtccccaccttccatccgcgcatgggcctgggcggcgtcggtgtaggcgtagacctggtcgatcatcggcaggcaacgcccggcactgagtaccggccacacgtgttcgcgcaggtgctgggcaatttcggccttctcttctcgagtgcgggcgcgcagcagtgagccggtgatcaccgcgcgtttgccgaggatggtcagcaggtcgacgtcgttggccttggcgccaccgagaaaaccgaggatcaccaggtggccgtccatgcccagggccttgaggttgttgttaaggtacgaggcacccatgatgtcgaggatcacgttgacgcccttgccgtcggtttgtttggcgatgacctcggcaaagtcctgttcgcggtagttgatcggctcggcgccgagcttggcaatcgctgcgcatttgtcggcgctgccggccgtggcgaatgcctggatgccgaattcctggcagagcatcaacgcggtggtgccgataccgctggtgccaccgtggatcaagacgcgctggcctttctgggctccgccgaggccgaacaggttggcccacaccgtaaagaaggtttccggtacggcagcggcctgaatccagtccatgcccgcggggatcggcagcgcctggctggccggcaccgcgcaatactgcgcatagccgccgccattggtcagggcacagaccttgtcgcccaggctgtattcgttcacgccagtgcccagcgccaccacttcaccggccacttccaaccccggaatcgggctcatgccgggcttcatcgggtatttgcccgcgcgttgcaaggcgtctgggcggttgaccccggcggcgtgcacgcgaatcagaatctcgcctggcccggccaccggtacgtcggcgctgcgtggctgcaagacctcgggcccgccaggggtggtgatttcgatcagggtcatttcttgggggagcgtcatggaaaagttcctgtagcgatgagcgtatgggttgggaccgtagcgcggggtcggcagttcagcaagatcatgccgggttctttgggcaatgcaaacgcaggatttcagcacaagcctgcaagtgcggcgacgcggtgttggacacactgactgtcggtcattttcgacgcaaacaggtggcatatgaaccaagcaagaaatcaggacatcgggctgttgtttttgcgggccagtggggcattgttcctgctgtgggtgcatgggttgcccaagttgctgcactacagcgaacaactaaagctgatcgaagacccgtttcacctgggcgcgtctatcaccttgctgctggcgattttcgccgaggtgctgtgcccattgctgatcctggcaggcgtgctggtgcgcctggcgtgcctgccgattctggcggtgctggtcatcgctttgctggtggtgcacccggagtggacgctgttcgaagggcagttcggttggctgctgctgatcatcttcaccagcgtgctgatcgcagggccagggcggctggtgttgagccagcgttttgcctgaacaaaaaagccgggcgaacccggccttttgccgtctgccttctgtaggagcgagcttgctcgcgaaaaactcatagacgccgcgttcattcagcaagcacgcgttatcgttgacgttcttcgcgagcaagctcgctcctacaagtgcatcgaggtatcagcggttcaggaacgccaacaggtcttcgttgagctgttgagcgtgggtcacggcaaacccgtgcggcgcatccttgtacaccttcaattgcgcgccctcgatcatctgcgccgcgactttgccggtggtgtcgaacggcacgatctggtcgccgtcgccatggatcaccagggtcggtacgtcgatcttgcccatgtccgggcggaagtcggtttgcgagaacgctgtgacgcaatccacggtcgacttgagcgaggcaagcatggcgatctgcagggtttggctgagcacaccctccgagacgtgctggcctttattgagaccgaagaacggcgtgttgaagtcgctgatgaactgcgcacgatccttcagcaggccggccttgatgccatcgaacacctcgccaggcacgccttgggggtaatcggcttgctggccgaagatcggcgtgaccgcgccaagcaacaccaggccggcgacacgggcactgccgtggcgggcgatgtagcgcgccacgtcaccgccacccatggagaagcccaccagggtcacttcctgcaggtccaggtgttcgatcaactgggcgatatcgtcagcgaaggtgtcgtagtcgttcccggtccatggctggtccgagcggccaaagccacgacggtcgaacgcaatggtgcgaaagccacggctgctcaggtattccatctggtattcccacatgtccgcatccagcggccagccatggctgaacagcacgggcttaccgctgccccagtccttgaagtagatctgtgtaccgtctttggcaacgaatgtgctcatctgaaactccttgcagggctgaaaaagggcggtgaaaaaaccgcatcactattgccgtaaacctgggcccaggcttgtatgggtgtgcttgtctcaccaactgaacttgagctccatgcccaggtaactgctgtcgtgcccaccggcatcacgcagggtctggcccaccgcgtagtgcaccgcctcgaccgcaccgctgaggttgggcgtaaaggcgtagtcggtgcgcagttggccgtaggcgccggtccagcgctcaccttggcccgccgtgcccgccacggccaggttgggctgggcgtagacggcgtctgcggtggtctgccgccacagcaggccgacagcggtttgcacgctgagcttggcgatgggcttgacggtaatcgacggcttgacgtggatcaggttgctgtagccggtataacccgccagggaaaagtaatagccattggggaacagcgggttgaaggtgccgaccttgccgtcatgggccttgcggtcaccggaggcgatatccagttgcaggccgatacgcggcttccaagccagcgtgtcaaaggtgtagccggtgcggctgccaccggcccaggcgcgaatcgtcttgctgcccaccgagccgcgttgcagcatggcttcgacatcccagtcgaacccctgggctgcgccaccgaggcgggcgtctagcaactggcgggtttcgtcgccgtcggcgtccaggtaatgggcggcactgcgctcgtatatgccgtaataggccgacagctcattggtgccgcccaccagccgctcgacccgtagcatgtggaagcgcgcgtcgctgttggacttatcgtcgaaatgccggccatcctggtactgcaccggttggctggcgatcccgataaagcgccattgcggcgtttcccagtccgcccacaacgcatcgaaggactgccgcacattcgggccgtcccgtgacgagatgaagcgctgcaagtcgaaggcgaaatcctggcggccagcccttgccttgaaggtgccagcgctgaaggtcttcacgtattcggcaaaggccaggcgcaggtcgacgcggttctggtcggcaccgccaatcgtggtcttgtcataggcccgcacatcttccaactgggtgaacagccgccagtgttcgttcaggtgcaagtcggcgtgcacctgaaagcgctggatcaggtagcggtcacgcgctacatcccgcacgccgaacccgctggcgtcgttcatctcgaagcgttcacgcaaggttgcgcccaacgacaagtaggtgaacgggttggcggcggacagtgggatgtacttgaggttgtccaaaggttgcgtgcgcaatgccgggtccttgagcacagaccagtcttcctgccagcggttggccttgatcgccgggcgaaccggctggtcgtcggcctgcacgccgccagcaagcaacggccacagcaccgccaggctccagcctgcgtgacgaatcattttgccgcgctgagttggtggatttctgcgacataaccgcctgggaactccaccaacgcactgcgccgacctttgctgtcgaacgccggcaccagcactgtggcgccagagccagtggccttgcccagggtggcggccaggtcggtgacctgataaccggtggtgtcgtggccgaacgggtagggcagttggccgttggtgaccagcaccgccatgcgcccgaacggcgattcgatatcaacccggcggtagtggccgccggcctggccgacatcaacgcctggggcgtgcttgtcgtcgctcaacaccttgccgtgggagaaacccaggaacgccttgataaaccgctcggcgctgtcgttggacacatacacacggttttccggcacggtgtcgaaggcggcgtaatccggggtcttggtgtgccagtacagctgcatgttcacgccccccggccattgcaccacggcatcacggccgatggggtcggggaaatcgctgacgatcacgtcggcgccattttcccgcgcggccttgagggccacgtccatgtccttgaccagatagccgttgcgttcctggccgaaggggtggggtacgggggtggtaaagccgaacaacgacacggtgcccgccggggtctgcagcagttgcgaggtggtgctgctcggcaccggcagcacgttgaccacgacctggggcgtgcttttgccgccgaaggtggcgaggaaactctgggcaaaacggtccacatcggtcggtgccacatacacatggctggtgtcgtactgcggcgccacggccacgcttggggtggcggcgaacgcgctgctcatcatcgcacttgccagcagcgtcaatgccagcgataccttggttgttgtgttacccatgcccgttctccagcgcttatgagggttcgaaagcggtgaggttagggggggcagggttgtgggggattgtatggacgtgctcggttgaacgtttcagctacgcggtccagacagcggccgcctatctacctgacacccctcaacccaaatgtgagggttaacttgcctctacctgacacccccgcaatcaaactgtgggagcgggcttgctcgcgaaggcggcccagcagtcaacacagttggattgggtacatatccattcctgcggtaacggccacctagggttccgccctgacggcggctcactttgcaaaagcggcaaagtaagcaaaacgctcttgccccaccactcggcacctcgcttaggctcggtgtgcccgaaatccgccggcatccctgccggtttaccccccaaatccctgtcgaatttcggccagcgtggtttaacggggcgcctgagatcaagatcacaagcagatcaagagcggctcgcttcgcatcgtggttagtgtggagtgtgcaacctgcaggttgtgcatctactgcactaccgctttcgcaggcaagccagctcccacatttgatctttgttaccttgagcgttgcgttcgcttgactgctcggcactggggctgcccacacatttggatcgcggggcatcagttaaatagccgttgtctgtcacgccaccatgatgatcttcgacaccaattccaccaccgtcttggcctggagtttcttcatcagccgcgcccggtgcacctcaacggtgcggtgggagattgccaggcgcagggcgatttccttggatttgaagccgttgacgatgtgcatggcgatttcccgctcacggggcgtgaggtcgccggtgccctggtgcatgcggtccaggcgttcgaagtgccagatcatcagtttgaacgggtctttgggcgtgagggtgtagccgtgggatttggcccagaacacctcgccgttgtggtgctgcatgaagcgttcatcggaataaaagccgttgtcgctgtcgagcagccagtcatggctgcgcttgccgatggcgtggtagtcggcctgggacgggtagatcagcagggtcagttggttgaccagtgcatcgcgcgtatagccgaacagcttcaggaaagcgtcgttgcagtcgagtatcacgcggtcgctggtgacgatctgcggggcaggggacagcttgaacgccaggcgttcgaggtcgggaaattgctgggctagcgcggtcatggggcatcctgcctcgttgttcaatgccctggggcgctacttacccgtgtaagtagttacacgaattggcgcacgatcaggggtgggtcattgtaagtaaagtccgaatcaagaacagaagaaattgattatgcctgctgattgcgtctccattgttgccgctggtcactcccgctttggtcgcctggaaggcacgacgctggaagatctgatcgtccaggttacccgggaagccttgagcgatgccgagattgacgcgtcgcaaatcgatgcgttattcctcggccatttcaactcggggctggtgcccgatgggtttgccgcctcattgctattgcaagccgaccccgggctgcgcttcaaaccggctacccgctgtgaaaacgcctgtgcgtccggctcggcggcgattcaggcgggggtcaacgcgatcctctccggcagcgctgagctggtgctggtggtgggcgccgagaagatgacccacaccagcactgccgcggtcacccaagccttggccggggccggctaccagaacgacccggccgaagccggcctgagtttcccccagttgttcggccgcgccgcgcgccaatacgccgagcgttaccactgcccgctgggctcgatggcggccatcgccaccaaaaaccactccaatgccatggccaacccgctggcgcagatgcatcgggagatgaatttcgagcactgcaacaacgtgtcccaaagcaacccgttcgtggctgactccctgcgcctgaccgattgctcactgatcagcgacggcgccgccgcgatcatcctcgcctcgcccaaacgtgcgcgcgcgtttcgtcgcgaggtgcagatacgtgcaatgacccaggtcaacgacacgctgcccatcgcccaacgcgacatcctcgccttcgagggcccacagcgggcgattcactcagcattgcgcggcgcaaatgtgaccctggccgacctgagtttcgccgaggtgcacgactgcttcaccatcgccgagctgctgatctacgaagccatgggcctggcgcccaagggcgaaggccatcgcgtgctcgacagcggcgtggtgcgcgccggcgggcgcttgccggtgaacctttccggcgggctcaaggccaagggacaccccgtcggcgccacaggggtgtccatgcatgccctggcgttccggcaactgaccggcgagccgattggtctgacggtgcccaacccagagttcggcctggtgttcaacatgggcggcatggcggtggccaactacgcctcggtcctgcaggcgcgccggagctgagccatgaacattgccaactggctgcacgatacccagcgccgggccccgcaccgcccggctttgttcgacggcagcgtgctagtggccgactacgccaccttcgccgcccacgttcgccaacgcgccgcgcagttggtggaacagcatggcctggtgccgggggacgccgtggcgctgctgatgaaaaacagctgcgactacctggaactgctctacgccatctggtggatgggcggggtggcggtgccgatcaacgccaagctgcaccccagcgaagcggcgtggattgccgataatgccgaggcgcggttgatctttaccgacggcggccaagtgttttcttcgcgagatttgcctgcgcgttgcacggaactggacggccacccgctgccgcccagtcatggttggccgaccctggaacagccggtgccccgccaggatcacgacctcgcctggctgttctacacctccggcaccaccgggcgctccaagggtgtgatgctgtcccacggcaacctgattgccatgtcgctgtgctacgccacggatgtcgacgcggtgagtgccgacgatgcggcgctgtatgccgcgcccatgtcccacggtgccggcctgtacaacttcatccatgtgcgctgcggcgcccgccatgtggtgccggcctcccatggcttccatgccgccgaactgttcgggctggccgagcagatgggcgatgtgtcgttgtttgctgcgcctaccatggtcaagcgcatggtcgaacaggcgcggcgccaggattatcacggcgccggcatcaagaccatcgtctacggcggcggccccatgtacctggccgacctgcgcgaagcggtcgacaccttcggcccgcgcctggtgcagatctacggccagggcgagagcccgatgaccatcagcgtcttgccccgcgccttgatcgccgagcgccagcgtcccgactgggccaccctggccgcctcggtgggccacgcgcaagcctgtgtggagatccgcatcctcgatgccgagcgccagccactgcccaccggccagcgcggcgaaatcgcggtgcgtggcgccacggtgatgcaaggctactggcgcaacccgcaagccacgcgccagacgctggtggatggttggctgctgaccggcgatatcggttacctcgacccggccggctacctgacgctcacggaccgctccaaggacgtgatcatcagtggcggcagcaacgtgtacccccgtgaagtcgaggaagtgctggcccagcatcccgaggtgttcgaagtgtgcgtggtgggcgagccggacgcgcaatggggtgaatcggtggtggccttcgtggtgacccgcagcggtcagcccctggacgaaggcgaactcaccgcgtggttcctggcgcggatggcctcgttcaaaaaaccaaaaaaatatgtgtggcgcagcgacttgcccaagaacagctacggcaagattctcaagaccgacttgcggcagtggttgaaagcagcgagtatcgccgcgctttaacatggatcgataatcagacaaggagtccccacgatgggcaatcccgcacaagacaccgtccgcaagcgccgccgtgcgtttctcggtgccacctccggccacttgatcgagtggtacgactacggcgtgtatggctttctcgcggtctatattggccaggcgttcttcgtctccgatgaccccaccaccagcctgttggccagctttgccgcgtttgcgctgagcttctttatccgccccttgggtgggctgttcttcggcccgctggcggacaagatcggccggcgcaaaaccctgatcatggcgctggtgatgatgaccggctccacggtgatgctgggcctgttgccgacctacgccagcctgggcatcgccgcaccgatcttgttgatcctggtgcgctgcgtgcagggcttctcggcgggcggcgagatcggcaccgtcaccagcttcatctctgaatacgccggccccggtcgccgcggctttgccacttgctggctgatggtcaccgccgtgctcggcctgctgctcggtggcgccgtggccaatggcatgacctgggtgctgggcgccgaggtcatgcaggaatgggcctggcgcgtaccgttcctgatcgccgcgcccctgggctttatctccatgtacatccgcctcaagctcgaagacagccccgagttcctcgccttgcaacgcgccgggcaaacctcccgggcgccgctgcgtgaggtctggcaatggaagcgggcaattgccctggtgttttttatcatcaccttgcacagctcgatcttttacctggtgctgaccttcgcctcgacctacatggccaagatcctcaagttcgacagcggcaccaccttgctgtacgtgttcgtcgccagcttctcggcggccttcgtgatgccgtttggcggagcctttaccgataaatacgggcgcaagccgttcctgatggtgatcggcacactggcgaccctggcgatgttctggctgttcaaatccgccccgaccgccaccccggcgaccttcttcgcaccgttgatggcggtggcgattttgttcgggctgtatgcatcctcgacctatgcgctgatgagtgagctgctgcccacgcgcattcgttctaccgggattgcggtggcttataacgtgccggtggcggtgttcggcggcagtgcgccgttgatttccacctggcttatcaaggtgacaggcgacattacctcgccgtggtatttctacgtggcgaccggggtggtgtcgttgctggcgttggtggtgttgcgcaaggaagattttgtcgccagcgctcactccacggcagtgcctgccagcgctgcgctggcttgaagcacgaacaccccgtaggagcgagcttgctcgcgaaaaacgcaaaggcgccgcgcttcttcaggatgcacgcgttatcgttgacgcttttcgcgagcaagctcgctcctacaggtacagagaattgccatgccggccacccgcttgaccctgatctgccacgccatcacgcccctgcaaaagcaggggcgttttccggatgacgagtccgtcacgatggactggcagggcgcggccctgtccctggccggccgctacaaacaacaggcacgcctgctgtgcggccccgaggccagaacccgccagagcgctggcttgttcggcgataacgcccaggtcgacctcgccttacgcgaccttgatgtcggcgcatggaaaggccagcgcatcggccaactcgacagcgcaaccttgaacacctgggccaccgacagcgccagtgcagtccacggcggcgagtcggtgggtcagttgtgcattagggttggccaatggctcaactccctcgaaacccaccccggccatgtcatcgccgtgacccacccgttcgtcatccgcgcggcgatgctgtccgtcatgcagttgccgatctcgatgttctaccggatcgacgtcgagccattgtccgccaccgagctacgcttcaacggcgtgtggcgcctgcgcctggaaacttccgcctgattcccggaacatggcaaaatcaacgccccgcactgagagcaccccatgaaacgcatcctgatcatcggcattggcgccggcaaccctgactacatcacgatgcaggccgtgaaggcgctgaaccgtaccgacgtgttcttcctgatggacaagggccagagcaaggacaagctgatcgacctgcgccgggaaatctgcgacacctacatcaccgaacccggctaccgttttgtcgaggccgattgcccggagcgtgtgcgcggtgagatcgactacaccaccgccgtgcaagacctcaaccgcgataagcagcagaccttcgaacgcatgatcaacgaagaaatggccgacggcgaagtgggggcgttcctggcctggggcgacccggcgctgtacgacagcaccattcgtatcttgcaggcgattcttgccagtggtcgctgtgtgttcgagtttgaagtgatccccggtatcaccagtgtgcaggccctggcggcgcagcataaggtgccgctcaaccgcatcggcaagtccatcgaaatcaccaccgggcggcgccgggcggcggggcaggcgagtgatgccgataccctggtggtgatgctcgacgccgaagattcctaccgcagcgtggcggatcaggacctggatatttactggggcgcttacctgggtacgccggatgagatactgatcagcggcaaagtggcacaggtggcagaagagattgaacgggtacgcaaggcggcgcgtctggaaaacggctggatcatggacacctatttgttgcgcaaaccctgaggtaaacacgatgctcaaacagcttgccttcgccttggccctggtggccggcgccgctcatgccgatagtggcttgcacaccgacttgccgttgtcctatctggaacagacccagggcgatgcgcgcaaccagccgctggtgatcttcctgcatggttttggcagcaacgaggaagacttgtttggcatcaaggacgcgttgccgtccacctggacctacctgtcggtgcgtgcgccactgccggtggcgccgcagggttatcgttggtttaccaagaccgatgagcctgagtacaacggcgagaccgacgaactgttcagcagcgcccggctgatcaaggactttgtgctcaaggccaccgccaagtaccacacccagagtgatcgggtgttcctggtggggttcagccagggcgcgatcatgtcttacgaggtggccttgcgtgaacccgaattggtacgcggtatcgccgcgctcagtggcagcgtgctaccagtgctcaggtctgcgctgaaaccggatgcgtcgatgggcaagctggcgatctttatcggccatggcactttggatcaggcgctgccctttagctcggccacgcaagcgaataaggtgctggcggggttggggctcaagccggagtttcatgaatacccggggatgaatcacaccatcagcgaagcggaaatccaggacttaaaagcctggctagagaaaagcctgaagtgaaatgcgcttaaaaatgtgggagctggcttgcctgcgaagacggcctgacagtcaacacagttggaccgtgtacatatccattcctgcggtaacggccacttagggttccgcnnnnnnnnnnnnnnnnnnnnnnnnnnnnnnnnnnnnnnnnacagttggaccgtgtacatatccattcctgcggtaacggccacttagggttccgccctgacggcggctcactttgcaaaagccgggatgccggcccaggccaaagtaagcaaaacgctcttgccccaccactcggcacctcgcctaggctcggtgtgcccgtaatccgccggcatccctgccggtttaccccccaaatccctgtcgaattccggccagcgtggtttaacggggcgcttgagatcaaaagcagatcaagatcaagatcaagatcaagatcaagagcgactcgcttcgcatcgtggttaccgtcggttgctacagcctataaagttgtgtagatacctatggccatcgcaggcaagcccgctcccacgtgggttttgtgttggctggaagaggtgggttatttgccgcctgtaatctgcttcaccaactgtgcatgccccttcacatcatccgcccgggaaatcgcctggatcaccagcaaatggttgcccgaaccacccaggaaagtggagttcagcgtcttgccaccaccttgggtagcgctgctgtccacttggcgcaggcccaggcccttgtaggtgagtttcttctcgcccagtttcttgaagtcgggcagggcagcactctggtccttgacgaaatcggccacggcgccgtcgaggaactgcgggtcgttatcctggatctttgtcccatcgttgcgcacggtttcggcgacgatcaccacacttttcgtcgttgagttggcgtacagggtgccttgggtgtcggcggtgccgtcttgcgccgtgccggagggcagggtgtcggcgctgtaggccttgggcagtttgaaggtgaacttgccacccaaggtggagatggtcttggtggtgggcttggcagcagcgaacacgctgctggcggtgagcgcgagggccagcagcattgcggtcttggtgaacgtggccatgaagcactccggggatgaacgaaattgcggcgtattctgtcagaaaattcgcaatctcgttcatcggccccgtcacactttgtcggaagattcttcctcaagcctgtccatttcaaacaagcgcgccagctccgcacgggcttcctgggcggtttgcatgaccttggccgcgtcgtcgtacaccgcgtgttgggcggcgagtacctgctggtcgtgggtcttgaagcggttgatgcgcgcatcggcctgggcctggctcaaaccgaggccgaccagggtacggcggctcatttccaggctggagtagaaggtttcgcgcaccggtgaagcgtccaggtccaccaagcggtgtacgtgctggcggttgcgcgcacgggcgatgatcttcatgtgcgggtagaggttgcgcaccaactcggcggtcttgatgttgatctccgggtcgtccatggcgatcacgaaaaattccgcctgatcgactttggccgcgtggaggatttccgggcgctgggggtcgccgtagaacaccggcatgccaccgaaactgcgggtcagctcgatggtttccaccgaggtgtcgagggcgatgaacgagatgttctgggcgcgcaggatgcgcgccacgatctggcccatgcggcccatgccggcgatgaccacgcggggcgcatcgctttcgatggcgcggtattcctcgggcacttccaccggcttggccttgggcttgaacagcttcgggcacaccagcaacagcagcggggtcacggccatggacagggtgatggtgagcaccagcacgtcgtacagctgcggttcgaacaggccctggtcgcggccgatcttgaacaccacaaaggcaaattcaccccccgccgccagcaccacgcccaggcgtaaagcgctttcgcgattgaggtcgcccaccattcgcccgacggcgtacagcagcggcagtttcaaaccgatcagcagcagagtcaggccgatcaccaccagcggtgtgctgagcagcaggctgaggttggcgcccatgcctacgctgatgaaaaacagccccagcagcaggcccttgaacggctcgatctgggattccagttcgtggcggtattccgaatccgccagcagcaggccggcgaggaaggcgcccagggccatggacacgcccaccaattccatcagccaggcggtgccgatcaccaccagcagcgcggtggcggtggacacttcgcgcaggccggtcttggcgacaatgcgaaacaccgggcgcaacaggtagcgcccgccgatgatcaccaccgcgatgctgccgaggatctgcagcacatgttgcaggccttgggcctcggtggtcggatgatcgctgccggccagcaacggcaccatggcgatcagcgggatggcggcgatgtcctggaacaacaggatggcaaaggccaggcgcccgtggggttggttgagctccttgcgttcggccaggctttgcaggccaaacgccgtggaggatagtgccagacccaggcccagcacgatggcgctgttccacgactggccaaacagccacagcgcgaccgcgcccatcaccacgccagtgagcagtacctgggccaggccgacgccgaacaccgccttgcgcatcacccataaacgtttgggcgacagctccaggccgatgatgaacagcaacagcaccacgcccagttcagaaaactgcgccacgctttgcgggttgccgatcaggccaagtaccgatgggccgatgatcacaccggcaaacagatagcccagcaccgcgcccaattgcaggcgcttggccaggggcacggtgagcaccgcggcgaacaggaacaccacggctgcttgtaacaggttgccttcatggggcattacgaactccagcatttgcatcgatcaacggtaggagcgagcttgcttgcgaaaaacgcaagggcaccgcgttatatccggtttgtcgcgtcatcgttgaggattttcgcgagcaagctcgcgcctacggtgggggaggatagggccctattagagcgctttttcacatttggaaacttgtatttttgtcgcgacagtcaatggatgttggctctcatcccatttttacgcaggttttacgaaagtattaataccatttaattcaatggctttcgcgcaggtctactaacgtttcgaaaaactggatcagtagtcaccacggtcaggtgtttcgaattcgatgcgtgtggatcgttgaaacaaggcgtgcacgcagtcacggatgaaaggcttggaccacaaggagtagaacgtggatagaagacttgcgactgccgctttacctcgtatttctgcgctttctcttgcgatccgcctgggcgtggccgggctggtgatggggctggcgagcccggatgtgttcgccgcctgtagcccggcgagtcccaccgctggagcgacggtgacctgtacgggtgtgccgacattgccgctgtttctcaataccttcagcagtgcagtcaacagcctgacggtcaacgtcaacgcgggggcgcagctcaatgcgacgttgggcggtaaagcactgaccctgacgggtaacaacacgacgttgaacaacgccggcacgattgaccccgcgttactcgggttggtaactctcctgagcggtggtgtggtgattggtaatacgacagccagcgtgttgaacatcaccaacgccgtcactggcactattcgtggcaccggcgcggtgcttggggtggacctggcctccttggacggcatggcgctgaacgccaccaacggtgtaggcggcatcaccacgatcgtcaacaacggcaccattggctcttcgtccttgctcaacctggcgctgctcccctccaacaccccagtggtggcggtgcagggcggcgggcaggtcaatatgactaacaacggtaccctgaccgggcgcgtggctttcgagagctctactgcggggaacaccttccgcaacactggcactatctctggtggcgtgtcgatgggggtcgccagttccaacacctttaccgctgtcacggggtcgcaagtgaccagtggcggcggcgtcgaggtaagcctgggcaacctgctcggcgtaaacctcacctttgcgcccaccggccaggtggacggcggcgcaggcggcagcaactcgctgattcttgaaaacacgacgggtgtcggtggtggcagtacaggcaccggcactgcttccagcgccaactatgtcaacttcaacaacctggccatcaacagtggcacctggacgttgcaggggccgttggtcagcggcagcactacgctcaatggcggtgtggcgcaattcaataacaacgcgacatttggcagcggtgtgctcacgtctaacggcggcgctatcgaggccaccggcaacggcttgacgctggctaacctgatgaccctcggaaccggtggcctgacggtgcagggggctgctaccgggctgactttgagtggcctgatctcgggcactgctggcctgaacaaagccggtaccggcgagttgatccttagcggcgccaacacctttcagggcggcaccaccttgaatgccggcacgctcacattgggcaatgccgcagcgctaggctccggtgccttgaccgtcgcgggtgcgggtacgttgcagagcaatgctgcgctgaccaccagcaatgcgattaccttgaacgccaatctgaccgtagatggcgtgaacccgctgacccttggcggggttgtcagcggcggttccgggttgatcaaggagggcgtatcgagcctggcgcttacgggcaacaatacttacaccggcgccacggccctcaacgccggttcgctggtggttggctccaatactgcgctcggcaccagtgtgttgaacgcctcggcgggtaccacgttggatgccagtgcagcagtgagcctgggcaataacctcaacctgggcggtaacctgacccttggcggcagcaacgcgctgacccttggcggcgtggtggcgggccttggcgggttgatcaagaacggcccggcggatctgatcctcaatcaagcgaacacttacctgggcaacacggcactcaacagcggcaagctggtgattggcgctaccggtgccttgggtgcgggtacgttgaatgcagccgcaggcacgaccctggacgccagcaccactgccacgctgactaacgcggtcaacctggccggtaaccttggaatcggcggcagcgccaacctgaccctgggcggcacggtcaacggtgcaggcagcctgaccaaaaacggcacggctggcctgacactcagcggcagcaataacttcctgggcggcaccacgctgaatgcgggcagcctgaccgtcggcagcaacacggcgcttggcctgggcaacttgaccgtcggcggcgccgctaccctggacagcacctcggcggtggcgctgggcaataacattgtcctcaacgccgggttgaccgtcggcggcgccaatgggctgaccctgggcggtgtggtcagcggtgcgggtgcgctgatcaaggatggcctggccaacctgacccttaacggcaccaacactttcaccggtggcaccagcctcaacgccggtacgttgaccttgggcacggcaggcgcattgggcgcaggccccttgacggtcggcggtgcggcaaccctggataccagcgcgaccttcaccctgggcaacgggattgccttgaatggcgacctgacgctggcgggtaacaatgacctgaacctcagcggcgtgatcagcggcgccagtgcgctgatcaaaaatggcttggctgacctgaccttgagcggcagcaacacttttaccgggccattgaatattgtctccggcagcgtcaccaccggcagcaccggtgcattgggcagcacctccggcgttgatgtcagcgctggcgctgcgctgaacctgggcgtcgattccagcctggcaggcctcagcggtgcgggtggcgtggcagtcggcggcggtttgaacctcactgtgggtggcgtcagcaccagcagtacctttgacggtgatctcagcggcgctggcggcttgatcaaggtcggcaccggcaccctcacgctcaacggaatcaatggcatcaccggtaacacggcgatcaacgcgggtaccctggatgtcgatggttctctgggcagcgcgttggtcaacgtgaatagcggcggcaccctcaccggcagtggctcgctattgggtacggcgaatatcaatagcggcgggcacctggcgctgggcagtggcacgaccttgtcggctggcggcctgaacatgagtgccggggccagtctggatgtggcgcttggcgcaccgtcgctgacttcgctgatgaatgtcggcggcaacgtgaatctggccggcgacctcaatgtgagcgatgccggtggctttggcgctggcgtgtatcgcttgatcaactacaccggcggcttgaccggtgcattgaacgtcaacacggtgccgctgggttatggcctgggtgatctgctggtacagacctcagtgggcagccaggtcaacctgttggtagcggcgccgaatattcgtttctgggacggcagcaacacccttgccaacggcactgttgacggtggcagcggcacctggacagcggggggcaccaactggacctcggccgacggcctttccaaccagacctggggcggtggctttgcggtgttccaaggtgctgcgggcactgtcagcgtggatggcgtacaaaccatcaccggtctgcaattcgtcaccgatggctacagcctggtcaatggcaccggtgggcagttgagcaccggcagcggcaacttcgccgtgcgcgtcgacccactggcgactgccaccctcggcgtcgatatcaccggcgcgggcgtgctgaacaaactcgataccggcacgctggtgctcaatggcgccaacagctacaccggcggcaccttgctcaatggcggtacggtggtggtcggcagcaacaccgcgctgggcactggcacgctgaccgctgcggcgggcaccaccctggacagcaacgcctctgtaaccctgggcaatgatgcggtactcaacggcagcctgacggtcggcggcagcaacgcattggcgctcaatggcgccatcagcggcaccggtggcctggtcaagaatggcacggcaggcctgacactcggcggcaccaataccttcctgggccctgtggccttgaacgcaggcgggctgatcctggcccgcaatacggcgctgggcgcgggcgtgttgaatgccgcaggcggtaccaccttggacgcgagcacggcggtcaccactaccaacgcgatcaatctggcgggcaacctgggcatcggcggcaccgctgacctgaccctcggcggcgcaatcaacggtgcaggcagcctgaccaaggagggcacggccaatctgatcctcagcggcgccaacgcctacctgggtggcaccaccctgaacgccggtacgctgaccttgggcagcgccaccgcccttggcctgggcaacctcaccgttggcggcgcggcgaccctggataactcggcagcgctgagtgtgggcaatggcgtcgtgcttgacgccaacctcgccgtcaccggcagcaacgacctgaccctgggtggcctggtcaccggcacggctggcctgagcaaagacggcgcggccaacctgaccctcaatggcgtcaacaccttccaaggcggcaccagcctcaacgccggcacgctgaccctgggcacggcagcagccctgggtaccggcgccttgaacgtaaacggtgcagctactctggccaacagcacaccgctggtattggccaatgcggtcaacctcaacgctgggctgaccgtgggcggtctcaacaacaacctgaccctggccggcgtgctggccggcagcggcagcctggtcaaaaccggcacggcggatgtgagcctcaccggtactaacaccttcaacggcctgttcgatgtgcaatcaggcagcctcaccacgctgggcaacggagcactgggtgtcggcgccggggtcaacctggcgagcggtacctccttgaacctgggcggcagcgccagcctgggcgccctcacgggtaccggtattgccaccgtaggcgccggcagcaccttgagcgtcggcaacaataatctggacagcaccttcgacggcatcgtggcaggcctcggcgacctggccaaagacggcacaggcgccttgaccctcggtggcctcagcgtggtgaccggggacgcccaggtcaacgccggcagcttgctcgtcaatggttccctggccagcgccaacgtggcggtgggcagtggtgccaccctcggtggtaccggtactttgttgggcaacgtgagcatcgccgacggcggccacctggccgtcaattccggcgcgaccctgaccaccggttcgctgctgctcaatgccaactccaacctggatgcgggcctcggcgcgcccgcgacgggcggcaccgcgctggtgcaggtcaacggcaacctgaccctggacggcaccctcaacgtcaccgatatcggcggcttcggtgcgggtatctaccgcctgatcgactacaccggcggcctgaccaacaacggcctgctgctgggcagcctgccggtgaacatcccggccagcgacctggacctgcaaaccgcgatcggcaaccagatcaacctgctggtcaacggcagcaccaacgtgcagttctgggacggcagccaaaccacgggcaatggcaccatcgaaggcggcagcggcacctggagtgcaggcggcagccaatggaccggcgtcaacggcgcattcaacaccgcctggaccccgaacagctttgccgtgttccaaggctcggcaggcaccgtcacggttgacggcgcgcaagccgtcaccggtttgcagttcgtcacggatggctacaccctggcgggcggcgcagcgggcgccttgaccctgttcaatggtgtgggtggcaacaccgccgtacgtgtcgatcccggcgtcaccgccaccctgggcgtcgcgcttaacggcggcggcactctggccaagctcgacaccggtaccctggtgcttaacggtgccaacagctacaccggcggcaccgccctggatggcggcaccctggtggtcggcaataacagtgccctgggcagcggcctcttgaccaccgccaacggcaccaccctggacagcaacaccgcggtcagtctggccaatgcgctcaacgtcaacggcagcctcaccctcggcggcagcaacgccctgaccctggccggcaccgtggcgggcacgggcagcctgatcaagaatggcatcgccaacctgaccctcagtggcaacaacacctatgccggcccaaccgcactcaacgcaggcggcctgatcctggcctccaacacggccctgggcagtggcgctctgaacgcggccgctggcaccaccctcgacagcagcacggcggtcgccctggccaacacggtcaatctggccggcaacctgggcattctgggcaccgccgacctgagcctgaacggcctggtcagcggtagcggtgggctgaccaaaaccggcgcgggcaacctcacgctcaacggcgccaacgcctacctgggcggcacgcaattgaatgccggctccctgaccctgggcaatgcgtcggccttgggcagcggtgccttggcggtcaatggggcaactaccctggacaccaacacggcgttggccctggccaataacaccagcctgaatgccgcgctcaccgtcggcggcagcaacgatctgagcctcaacggtgtagtggacggcagtggttcgttgatcaaggccggtggcgccaacctgacgctcaacggcgccaacacctacagcggcggcacggcgctcagtgccggcacgctgaccctcggcagcaccacagccctgggctcgggcgcgttgaccgtcggcggtacggcgaccctggccaacagcacgccgctggtgctggccaatgcggtcaatctcaatggcgacctcactatcgctggtagcaacaacctgaccctggccggtgtgctcgctggcaatgcggcgctgatcaaaaatggcgcggcggacctgctgctgaccggcaacaacagcttcagcggcccgctgaccgtggcggcgggcagcgtgaccacgacgggtaatggtgcactgggcaccacctccggcgtcactgtcggcagcggcgccagcctcaacctgggtggcaatgccaacctcaacagcctggccggcgacggcgtggtacaggtggctggcggcaacacgctggcggtgggtggcagcaacctggataacagctttggcggcgcgctgaacggtgccggcaacctggataaaaacggcagcggggtgctcaacttgagcggtaccaacgccatcagcggtgcggccaacgtcaacggcggtaccttgaatgtcaccggttccctggccagcggcacggtggcagtgagcagcggcgcgaccctggccggcagcggttcattggccggcgcggtgaccgtggccgacggtgggcacatcggcctggcctccggcagcacgttgtcggtgggctcgttggtgctgggcggcaactcgaacctggatgtcggtctcggcaccccagtgctgggtggcggcacaggcctgctgaatgtcggcggcaatctgaccctggacggcaacctcaatgtcaccgatatcggcggctttggcagcggcgtctacaacctcatcaactacaccggggccttgaccgataacggcctggttctgggcacactgccaggcagcgtggtgccgggcgacctgcaagtgcagaccgcgatcaccaacaaggtcaacctgctggtgactgcgcccaacaccaccgtgcagttctgggatggcaacagcctgatcggcaacggcgcgattgacggcggcaacggcacctggaacgccggcaataccaactggaccaatgtcgacggcaccctcaaccagggctgggtcaacagcttcgcggtgttccaaggcgaggcaggcaacgtgacggtggacggcacgcagaacatcaccggtatgcagttcgtcaccgacggctacaccctgggcgccggcacggcgggggtgctcaacctggtcaatggcggcaccggcaacaccgcggtgcgcgtcgacccgaacgccaccgcgaccctgggcgtgatcctcaacggcgccggcaccctggccaagctcgacagcggcaccctggtactcaacggcagcaatggctacaccggcggtaccgcgctgaacggcggcaccctggtggtgggcaataacagtgccctgggcacaggcgctctgacggcgaccggtggcaccaccctggacagcaacgcggcggtcagcctggccaatgcggccgtgctcaacggtgccttggcggcgggtggcagcaacgcactgaccctcgacggggttatcagcggcagcggcagcctggtgaaaaacggtgcggcagcgttgacgctcaatggcgtcaacagctacagcggcggcacgggcctgaacgccggtcaattgatcctcggcaataatgctgccctgggcagtggcgctttaacggtgggcggcgcggcgcaactggatggcggcaccgacctgcaactggccaatgccctcaacctcggtggcccgctgaccctggccggcagccacgacctggccctcaacggcgtggtcagcggcagcggcagcctgatgaaaaatggcaacggcgccttgttgctgaccgctgccaacacctacagcggcggcaccacgctcaacggcggcagcaccacgggcaacgccaccagcctgcaaggcgctatcgccaacaacgcggcgttgacctttgagcaagccagcgacggcacctacaccggcaacctcaccggtaccggcgtgttgaacaaaaccggtaccggcgcgttgctgctcagcggcaacaacacctttactggcaacaccaacgtcaacaccggcagcctgctggtcaacggcaccttgaatagcgccgtggtgcaagtcgctagcggcgcgaccctcggcggcagcggtaccctgggcggtgcggtgaacatggctgacggctcggtgctccaggccggtgccgcgacgccgctgtcggtgggttcgctggccttgtcatcgggcaccaccctggacttcgccctcggtgcgccgggtgcctccagtacagcggtgaacgtggcgggcaacctgaccctggacggcaccctcaacgtcagcgataccggcggcttcggcgtcggcgtgtatcaactgttccgctacggcggcagcttgaccgataacggcctcacctttggcaccttgccggtggcactgggtaacctgagcctgcaaacggcgctggccaaccagctcaacctggtggtgcaaaccaccccagggcagatccagttctggaacggcggcaccaccaaccctgatggcagcatcagcggcggcagcggtacctggggcccaggcaccaactggaccgaccccaccggcacccaagggcaggcgtccaccaatcagttcgcggtatttggcgggcagggcggcaccgtgaccgtggtcggcaaccaaggcttcactggcctgcaagtgctggacgccggctacacgctggtcgccggcgcaggcggcagcttgagcccgaccaatgcggcggatggcagcctggcgccggtgcgggtcaattccggcgtgaccgctcagattgatgcaccgctggtgggaaccggcggcatcaacaagctggatgcgggcaccttgctgctgactggcgccaatacctacaccggcggcaccaccgtcagtggcggtacgctggcgggcaccaccaccagcctgcgtggcaggatcctcaacaacgcgcggttgttgttcgcccaacgcaccaatggccagttcagcggtaccttgagcggcacgggtgcgctgatcaagcaaggcgcaggcgcgctgttgctgaccggcaaccagccgttcagcggcaccgtggcagtggaagagggcgtgttgcaagtgggtaacgcggccaacccaggcgcggtgcttggcggccaagtcactgtggccaacggtgcggggctgaccggtaacggcagtgtcggttcgctggtcaacaacggctcggtgacgcccgacggtggcaagctgaccgtggccggcaacttcaccaacgccagcaccggtgcgctgaacctggtgatcaccccatccaccaccggctccctggccgtgggcggcaccgccaacctgggcggtaccttgaatgtggtcaacctggctccctatgccggcgccaccacctacaccctgctgacagccggcgcggtcaacggcacctttgccaccaccaacctggagaacctggcgttcctcacgaccgcgttgaactacagcccaacccaagtggccctggcggtcagccgcaacaacgtcagctacgccagcgtggcggccaccggtaaccaacgcggcgtggcggcggcgttgggcacaggtaccgcagtcggtggcgcagcggtgcaaaatgcactgcttaacggtaatgcagcggcggcacgtgcggccttcgacagcttgtccggcgaaatccacgccagcaccgccagcgccatgcttgaagattcgcgttatgtgcgtgacgcggtcaacgagcgcctgcgccaacccggttgctaccgcgaggacgacccgcgcaatgctctggcacccagcgagaaccacctgagcagcgccggttgccacggcgagatggtcggttggatgcgcgtgctcggcacctggggccatatgggcggtgacagcaacagcgccaagctggaccgcaacctcagtggcttcctgctcggtaccgacaagcaagtggacgacgcctggcgcgtgggcgtggccgccggctacacccgcagcgacctggacgccaagcgccgcaattccagcgccgatgtggacagctaccacctgatggcctacaccgcctaccagcaagaagccttcgccgcacgcatgggcgtggcgtacagctggcatgacgtcgaaagcaaacgcaacgtggccgtcggcggcgagggccaacgcctcaaagccgactacaaggcacgcagtgcgcaagtattcggtgaagtcggctacaccattcaaacccctaccgtagccctggaaccgttcgccggcctggcctacgtcaactacgacagcgacacgatcaaggaaaaaggcggctcggcagccctgcgtggcgatgccgaccaggacatcacctactcgaccttgggcgtgcgcattggccagaccatcaccctgggcaacggctcgaaaatcaccccacggggcagcatcggctggcgccatgccttcggtgacaccaagcccgacgccgacctgagttttatcaatggcggtggctcgttcagcacccagggtgtgccgattgccaaggacagtgcggtggtggaagcgggcctggattaccagatcagccagaacggcagactgggcctgggctattccggccaactctcgcgcaacgacaaggaccacgcggtgacggtgagtttctccctcggtttctgatcacggccgagttttcttgaaccgcccgcaagggcggttttttttgcgctgaaagcagggcctgccgaatccccatgtaggagcgagcaagttcgctcctacaggtaagaaccgtgctattcctcttgtccccgcttcccatgtcaccccccagcccacagatcccttaattttcaagcctgccggaagcccctccaggcctacggctgcgcccgcagttttttacaggcgcgcggtactgccgatccaagcggcaaaactgaatacggacattctcgtcaaccgtgaattatcaggcaggttccccatgcagttcagcgacttactggcagcgatctccacccacgcgatccgtctgcaaatggaagaaggcgatctgatcgtcctgggcgatgaccaagcgttggacgacgcgctctgggatcaattgatcgcacacaaatcccaactgctggagttggtcgccgaacatggcggtgactggctgagcccggcctaccgcatcaccccggatatgctggcgctggtcaacctcgaccagccggccatcgaccgcatcgtcgcggcggtcccaggcggtgcggcgaatgtgcaggatatctacccgctggcgccgcttcaggaaggtatgctctatcaccacatctcggcgcagaagggtgacccttacgtgctgcacgcgcagttcgtgttcgacagccgcgcacgccttgaggcctttgccgaggcgctgcaatgggtcatcgaccgtcacgacattttgcgcacttcgatggtctgggagcgcctggacgaaccgctgcaggtggtgtggcgcaaggctgtgctggcctgcgaagaggcgcagctggacggtgctgaccgcctggctcaattgctcgctcgctatgatgcccgcgcttatcgcatggacctgggccaggcgccgctgctgcgcctggtgttcgctgacgacccagccaaccagcggctggtggcgatgctgttgttccaccacaccatcctcgatcacacggccctggatggcgtgcggcatgaaatccagctgtacctggccgggcagcaagcccaggcccctgcaccggtagcgtttcgcagctatatcgcccaggtgcgccatggcgtcagcgagcaggcccatgaggcgttcttccgcgacatgctggcggatatcgatgaaccgacgctgccgttcggcctgcaagatgtgcagggcgatggccagggcatcgacgaagtgcgcatccctgtcgacagcgctctgagccgccgcttgcgtagcgtggcgcgcccgctgggggtgagtgtggcgagcctgatgcacctggccttggcgcgggtgctgggcgcagtctccgggcgggaggcggtggtatttggcactgtgatgctcgggcgcatgggggcgggcgagggcggtgagcgggcattgggcatgttcatcaacaccttgccactgcgcgtggatgtgggtgagcagggcgtgcgcgctgcggtcaaggtcacccatgagcgcctcacgcgcttgctcgatcacgaacatgcgtccctggcgctggcacaacggtgcagcggcgtggcggcgcctacgccgctgttcagcgcgatacttaactaccgtcacagcgccgccactgacatggcggcggtgatcgaagtggccgacggcatccaggtgctgggcgccgaggagcgcaccaactacccgctgacggtgaacgtcgatgacctgggtgaagacttcgccctgaccgtgatggtcgatgcctccattggcgcgccacgggttgccggttacctgcacgcggccttggaaagcctggccggcgccctcgaacaacgaccggagatgccgctctgcggcctgaacatcctgcctgacgctgaacgccatcacttgctgcacaccttgaacgactgccccacgcactacgccgacacccagctgatccaccagcaagtcgaaacccacgccaccgcccagcccgatgccattgcgttgtccttcgagcaacacgccctgacctaccgccaactcaacgaacgcgccaaccaggtcgcccacgcgctgctggctcacggcgtgcgccccgacgcgcgggtggcgatctgcgtggagcgcggcccgcagatgatcatcggcctgctgggcatcctcaaggccggcgccggctatgtgcccatcgacccggcctatccccaggaacgcatcgcctataccctggccgacagccggccggtggcggtgctggtacaggccgacacggcgcagcgggtcggcgcactggcccggatcgacctcgaccacctgggcccgttgcccatcagcaacccccggctgcacctgagcccggccaacctggcctatgtgatctacacctccggctccaccggccagcccaagggcgtgatgatcgagcatcgccaggtcgcgcgcctgttcggcgccactcagcagtggttcggcttcaatcatcatgatgtgtgggcgttgttccattcctttgcgttcgacttttccgtgtgggaaatctggggcgcgctgatgcacggcggccagttgctgatcgtgccgcaactggtcagccgctcaccggatgagtgctacgcgctgttgtgcgatgcccaggtgagcatcctcaaccagacgccgagtgcgttccgccagttgatcgcggcccagggcaacagcgcccagtcccattccctgcgccaggtgattttcggcggcgaagccctggaaccgggcatgctcaagccgtggtacgcacgggcggtgaatgccggtacgcaactggtgaacatgtacggcatcactgagaccaccgtgcatgtgacctaccgggcgctggaagcagccgacgcgcacttggtcggcatgagcccgattggcgtgcgtattcctgatttgcagttgtacgtgctggatgcacgccgcgagcccttgcccctgggtgtggtgggcgagttgtacgtgggcggcgccggggtggcgcgtggttacctcaaccgcgaggcgctgaatgccgaacgcttcgtcgccgacccggccaccggcctgcgcatgtacaagaccggcgacctcggccgcctgctggccgacggcagtgtcgagtacctggggcgtaacgatgaccaggtcaaggtccggggtttccgtatcgaactgggtgaaatccaggcgcatctggccacggccaacggcgtgcgcgatgcggtggtgatcgcccgtgaagatcagccggacgacaagcgcctggtggcctatgtgatcagcgatggcgaactcaacgtggccgccctgcgtgaccatctgctgcgcagcctggccgaacacatggtgcccagcgccttcgtgcgcctggacacgctgccgctgaccaccaacggcaaactcgaccgcaaggccttgcccgcaccccatgccgacgccgtggcccggcgcgcgtatgcggcgccccagagcgcggtggaaaccaccctcgccaggctctggcaagacctgctcaacgtcgaccgtgtcggtcgtgaggacaatttcttcgaactcggcggccattcgctgctggcggtcaaactgatcgaacgcatgcgccaggtcgacctcagcgccgatgtgcgcgtgctgttcggccaacccactttggcggcgctcgctgcggcggtgggcggccagcagaccgtgcaggtgccggctaaccccattcaagcagacacgcaggccatcaccccggacatgctgcccctggtcgagctggatcaggccgctatcgaccatatccttgaggccgtgcccggtggcgttgccaacgtgcaggacatctacggcctggcgccgttgcaggccggcattctctaccaccacctggcgaccaccgagggcgacccttacgtgttgcaggtgcagttgcgctttcacgaccaaggcgctgtcgatgggttcgtaaatgcgctgcactcggtgatcgaacgcaacgatatcctgcgcaccgccatcctctgggagggcctggaggaaccggtgcaagtggtgttgcgccaggcgcccttggtggtcgaacgcctggatgccttgggcggcgatgcactgacgcacctgcaacagcgtttcgacccacgccactatcgcctggacctgtcacgcgcctcgctgatgcgcctggcgtatgcgcaggacacccaaggcgtggtcggcattttgctgctgcaccatgtcctcctcgaccatacggccctgcaggtgctggtcgaagaaatgagcgccagcctgcatggccacagcgcgcaattgcctgacgcggtgcagtaccgcaactacgtggcccaggcccgcctcggtgtcacccaggcccagcatgaagccttcttcagccagatgctgggcgacatcgacgagccgaccctggccttcggtttgcaggacgtgaatggtgacggcagcggcatccatgaagcgcgcctgccgctggagccggcgcttaacctgggcttgcgcgaacaggcgcggcaactgggtgtgagcaccgcgagcctggtgcacctggcctgggcccaggtgctggggcaggtgtctggccagcaggaggtggtattcggcacggtgttgctgggccgtatgcagggcggcgagggcgctgaccgggcgctggggatgttcatcaataccttgccgctgcgggtcagccttggcagcgtcggcgtgcaggccggcgtgcgcgctacccatgcgcgcctggcgcaactgctcgggcacgaacatgcctcgttgtccctggcccagcgctgcagcggcgtgccgggctcgctgccgctgttcagcaccttgctcaactaccggcacagcgcagccgatgaagcgccgggggacaacccctttgccgcttccggtatcgagattctcagctccgaagagcgcagcaattatccgctggtgctcaacgtcgatgacctcggcacgggcatgcgcttgaccgtgcaaggcgtggccgaactggatgtgcaacgggtgggcaactacatgctcaccgcactgcgccacctggtgactgcgctgcaacaggcgccgaccaccgcgttgcacagcgtgtcgatcgtgccgccggcggagcggcgcaaactgctgcaggacttcaatgccagcgcccgtgaatttccgtcgcacctcagcgtcgcccaactgtttgaagcccaggtgctggcccggccggaagccacggcggtggtgcatggcgaacactccctgagctaccgcgacctcaaccgccgtgccaaccggctcgcccattatttgctcaaccagggcgtgcagccgggtgagccggtcgccctggcgctgccgcgctcaattgacttgatcgtcagccaattggcggtactcaaatgcgcttcggtctacgtgccgctggacgtcaatgcgccgcctgaacgccaagccttcatggtgcaggacagcggcgcccgtcagcggctggacaacctggccgagctgaacctggacgtaatgcctgcgaccaaccccgcggtggcccagagctcggacagcgtggcgtacatcatgtacacctccggctccaccggtacgcccaaaggcgtgttggtgacccatcgcggcatcagccggctggtgatcaataacggctacgccgacttcaacccccatgaccgcatcgcgtttgcatccaacccggcgttcgacgccagcaccatggatgtgtggggcgcgctgctcaacggcggccaggtccaagtgatcgaccacgccaccttgctcgacccgctggcatttggcgctgaactcaagggcgctacggtactgttcgtcaccaccgcgctgttcaaccagtatgtgcaactgattccacaggccctggccggcctgcgcattttgctgtgcggcggcgaacgtgccgacccggcagcctttcgcagcctgttggcgcaggctccggcgttgcgtctggtgcattgctatgggccgacggaaaccaccacctacgccaccacgtatgaagtgcgcgcgctggcctcagatgccgacagcgtgccggtggggcggccgatttccaacacgcagatctatgtgctggatgcacagttgcagccggtcccgctgggcatcaccggtgaaatctgcattggcggggagggcgttgccaagggctacttgaaccgtgcgcagttgaccgccgagaagttcgtgaacaacccctttgtcgatcagcctggggcactgatgtatcgcactggcgacctcgggcgctggtcggaagatggcctgctggagtgcctggggcgcaatgacgaccaagtcaaaatccgcggtttccgtatcgaactgggcgagatcgaggcacgcctggccagttgtgcgggtattcaggaggttgccgtgctcgcccgtgaagacgtgccgggggacaagcgcctggtggcctatttcacctgggccggcgcagatctgggcattgaccaggtacacgcgcacctgcaaggccaactgccggactacatgctgccgtcggcctatatgccgctggccagcctgccgttgaccaacaacggcaagctggaccgcaaagcattgccggcacccgaccaggccgcctttatcagccgtggctacgaggccccccaaggcgaggtggaaagcctgctggcgcagatctggcaggacgtgctcaagcttgaacgcgtggggcgtcatgatcacttcttcgaactgggcgggcattcgttgctggcggtcagcctgattgaacgcatgcgccaagtgggcctgagcgccgatgtgcgcgtgttgttcagccagccaagcctggccgcgctggcggcagccgtgggcagcggcagagaaatcgtggtgcccgccaatggcatccccgccggctgcacacaaatcacgccgtcgatgctgagcctggtgcagctcaccccgcaggccatcgcgcgcattgtcgccaacgtgccgggtggtgcagcgaatatccaggatatctacccgctggcgccgctacaggaaggcattctctaccaccacatcagtgccgagcagggcgacccgtacctgctgcaatcgcgcatggcctttgacactgtcgagcgcctgcacgcctttatgggcgcgctgcaacaggtggtggcgcgccacgatattttgcgtaccgctgtggtgtgggaagggctcgacagcccggtgcaagtggtgtggcgcgccgcccaactggcggtgcaggaggtgatgctcgacccggccggcggcgacgtcatggcgcaactgcacgggcgtttcgatgcgcgtcactaccgcctggacattacccaggcgccgttgctgcgcatggtctacgcccaggaccccacgcacaaccgggtcgcggcgatcctgctgttccaccatctggcgctggaccacaccgccatggaagtggtgggccaggaaatgtgtgcctttatgttcaaccaggcccaggacttgcctgccgccgcgccgtttcgcaactatgtggcccaggcgcggctgggcgtcagtgtggcgcagcatgagcagtttttccgcgacatgctcgccgaggtcgacgagccgaccttgccgtttggcctgcaggatgtgcagggcgatggccgtgcaatcgaagaagccaaggtgcacctggaggcaggcctggcccagcgcgtacgccagcaggcgcgccaactgggcgtcagcgccgccagcctgatgcacctggcctgggcccaggtgttgggcctggtctcgggccgcgatgaggtggtgttcggtacggtgctgatgggccgtatgcaagccggcgagggcgcagaccgtgcgctggggatgtttatcaacaccttgccgctgcgggtcgacgttgcagccggtgcgacgcaggcggtcaaagccacccatgcgcgcttgagcgccttgctcgggcacgagcatgcgtcacttgcgctggcccagcgttgcagcggtgtgccgaccagcacgccgttgttcagcgccttgctcaattaccgccacagcaaccccgacgacatggcccgcgacggccacggcatctgggaaggcgtgcaactgctgggcggcgaagagcgcagcaactacccgctgaccctgagcgtggatgacctgggcgaaggctttggcctgagcgtgctggcggtgccgcagattggcgcgcaacgcctgtgcgactacatgctcagtgccgtgcagcaactgattgtcaccctggagacggcgccccacagtgcgctgcacccattaccgattctgcccgccgcagagcgcgacacggtactgcgcgagttcaacgccaccgcccacgacttcccccatggccagaccctgcacggtgcgtttgaagtgcaggccgagcgccaaccccatcgcattgccgtgcagcaaggcagtgaggcgctgacgtatcagcagctcaatcaacgggccaaccagttggctcatcacttgctggaactcggcgtgcaagccgacgaccgcgtggcgctgtgctgccgtcgcggcccgcagatgctggtggggctgttgggcattctcaaggctggcgcgggctatgtgccgatcgaccctgcgtaccccgccgagcgtatcgcctacttgctgcaagacagcgcgcccgtggcggtgttggccgagaccagtacccgggagctgctcggttcggttgccctggtcgatctgcatgaccccgcctggcagcgccacgccgtcagcaacccgcaattgcccgccctgacgcccgcgcacctggcgtacgtgatctacacctccggctccaccggccagcccaagggcgtgatggtggaacacggtacggtggaaaacctggtgcattggcactgtgaggcctttggtctgacagcggtaagccacaccagcagcgtggctggcatgggctttgatgccatggcctgggaggtctggccagccctgtgtgtcggcgcgaccctgcacctgccgcccgccgagattggcaacgaaaacatcgatgagctgctggcctggtggctggcacagccgttggacgtgagcttcctgccgacgccggtggccgaatacgccttcagcctgccccagcagcaccccacgttgcgcatcctgctgatcggcggtgatcgcttgcgtcagttcagccaggagcggcgctttgcggtggtcaacaactacggccccaccgaagccacggtggttgccacctccggccgcgtgcgggccgggcaggtgttgcatatcggccggcctgtcgccaatgccaccagctatgtgctggacgcgcacctgcgcccggtaccggtgggtgtggccggtgaactttatgtgggcggcagcggcgtggcgcggggttacctcaaccgtgccgagctgacggccgaacgcttcctgcaagacccgttcaacgctgggcgcatgtaccgcaccggtgacctggtgcgttggctgcccgatggcaaccttgaatacctgggccgtaacgacgaccaggtaaaactgcgcggcgtgcgggtggaactgggtgaaatcgaaagccgcctggcggcactggacggcatccgtgaggccgtggtgctggtgcgcgaaggccgcctgctggcctggttcaccgaacagcgcccgttgcagatcgagaccttgtgtgcgcacctgcaagcccagcttcccgaggcgctggtgccggtcgcctatatgcagctcgaccagttgcccctgaccgccaatggcaaactggatcgcaaggcactgccgcagccagaccagtgcgccttgctcagtcgtgaataccaagccccccaaggtgacgtcgaaaccaccctggcgcggctgtgggccgaggtgttgcaggtggagcaggtgggtcgccatgaccacttcttcgaactgggcggccattcattgctggccgtcagcctgattgagcgcatgcgccaggccggcctcagcgctgatgtgcgcgtgctgttcagccagccaaccctggccgcgttggccgccgctgtcggcagtggccgcgaagtgcaggtgccggccaatcgcatcagtgccggttgccagcgcatcaccccggacatgctggccctggtggacctcgaccagtcggccatcgaccaggtggtggcccaggtgccgggaggcgctgccaacgtgcaggacatttacccgctggcgccgttgcaggaagggattttctatcactacctcacggcggcgcagggcgatccttacctgctgcaatcgcatctggcgtttgacagcatcgagcgcctgcacgcctttgtgcgcgccctgcaacaggtgatcgaccgccacgacattctgcgcaccggggtggtgtgggagggcctggcacaaccgctgcaagtggtgtggcgccaggcgcagttgtgcgtacaggaactgcacctgcaaggcgacgtactcgccggcctgcacgagcgctttgatgcgcggcgttatcgcctggagatcagccaggcgccgctgatccgcctgatgtacgcccaggacccggtcaaccagcgcgtggtggcggtgttgctctatcaccatatcgtgttggaccacaccgccttcgacgtggtgttgcgcgaaatgcagggccacctgttgggccacgccgcgcccaccgccgcgccaatgccgtatcgcaactatgtggcccaggcgcgcctgggtgtcagcgaacaggagcatgagcagttcttccgccagatgctggatgatgtcgatgagccaacgctgccgttcggctggcaggacgtgcgcggcgacggcaatgccatcgacgaacataccctgcaactggacagcccgctcaaccgccgcctgcgcagccaggcgcggttgctgggggtcagcgctgccagcctgttccacctggcctgggcacaggtgctggccgcagtatcggcgcgccatacggtggtgttcggcacggtgctggtgggccgtttgcaaggcggcgagggcgccgaccgcgccctgggcgtgtttatcaacaccttgccgctgcgcctggatatcgacgaccagggcgcacgcgccgccgtgcgggccacccatgcgcgtctcaccgaattgctcggccatgaacacgcctccctggccttggcccagcgttgcagtggtgtagcggccccggcgccgttgttcagctcgatgctcaactatcgccatcgcggcgccgccacccgctcggcggatgcgcaattggcgtgggaaggcatgcagactttggtcaatgacgggcgcaccaattaccccctgaccctgaacgtggacgacctgggcgacggctacgcgttcactgccctggcccaggtggatgcgcagcgggtgtgcggctatatgcataacgcgttgagcggcctggtcgaggctcttgagcaggcgccgcaccaggcgctgaaccgcctgccggtgctgggactgcaagagcggcaacaactactggtgcagttcaacgccaccgaggtgaactacaacctcgaccagaccctgcacgggctgtttgaagcccaggttatgcgcaccccgcaggccgtggcggtgaaggccggcgagcacaccttgagctaccagcaactcaatgaacgcgccaaccgcctggcccatcacctgtgtgacagcggtgtgcgcccggatgcacgggtgggcatctgcgtcgagcgcggcctggacatggtcatcggcctgttcgccatcctcaaggccggcggtgcctatgtgccgctggacccggcgtacccgccagagcgcatcgcctacatgctgcacgacagcgcgccggtggtggtgctggcccaaagcgccacccgcgctttgctgggtgacgcggtggtgatcgacctcgaccacagcacctggcagcaccaacccgtcaccaacccgccagtaccgggcctcactgcccggcacgcggcctatgtgatctacacctccggttccaccggccaacccaagggcgtgatcaacgaacatgccggggtggtcaaccgcctgttgtggatgcaggacgcctatggcctcaaggcccacgatgcggtgttgcagaaaaccccgttcagcttcgatgtgtcggtgtgggagttcttctggccgctgttcaccggcgcacgcctggtgatggcgcgccctgaagggcacaaagacccggcgtacctgtgcgaggtgatcgccgcggagcacatcacgaccctgcactttgtgccgtcgatgctcgatgtgttcctggcccacggcgatatcagccaagcggtgggattggtgcgggtaatgtgcagcggcgaagcgctgccgggcagcctggtgcggcgtttcaagcaccagttgccggggattggcttgtacaacctgtacgggcccaccgaagcggcagtggacgtgacggcctggaactgcgcccgccctgaggtgccggacaacaccccgatcggcaagccgattgccaacacccgcctgtatgtcctcgatgggcagttacagccggtgccgttgggcgtggccggtgagctgttcatcgcgggcgtgcaagtggcgcggggttatctgaaccgccctgagctgaccgccgaacgcttcctcgacgacccgttcaccccggggcgcatgtaccgcaccggtgacctgggccgctacctgcccgatggcacgcttgagtacctgggtcgcaatgatgatcaggtcaagatccgtggcctgcgcatcgagctgggcgaaatccaggcgcggctgatcgagcatccggcggtcaaggacgccgtggtcgtcgcccgtgatcagcgcctggtcgcgtattacaccggcgcacccgccgacatcgacagcctgcgcgcccagctgttgcagcacctgccggactttatggtgccggcgctgttcatgcacctggacgcctggcccctgagccccaacggcaagctcgaccgcaaggccctgcccgcaccgggtatggacgccttgcaggtacgtgagtacgcggcgcctgaaggcgacaccgaggtcctcctggcccagctctgggccgagctgctcaaggtggagcgggtagggcgccacgacaacttctttgaactgggcgggcactcgctgctggccgtgagcttgatcgggcgcctgcgccaggaaggcatggaagccgatgtgcgcgggttgttcgaacaaccgaccctggccggctacgccgcaatgaccgaacgaatggagatcgtcctgtgaacatcctcgagctgctggcaaccctgaaaaccaaggatgtgcaactggcgctcaagggcgagcagttgtcggtgaacggcaacaagcacgccttgagcgacccggcgatattggccgccttgcgtgaacacaagccggcgctgatcgaactgatcaaggccggtgaatacaccgcgaccaaggccggtgaggtacaggtgccggccaatggcatcccggccgctgccgagcgcatcacccccgcgatgctgaccctgtcgaccctgagccaggacgagattgagcgcattgtcgccacggtgcagggcggcgtggcgaacatccaggacatctacccgctggcgccgttgcaggaaggcatcctgttccaccatgtgagtgccgagcagggcgacccctatgtgatgcagtcgcagttcgcctttgacagccttgcgcgtttcgatgcgtttgcccaggcgctgcaacgggtgatggaccgtcacgacatcttgcgtaccgggatggtctgggatggcctggcgcaaccctcgcaagtggtgtggcgccaggcgcgcctgccggtgcaagccttgatgctggacccggccgacggcgatatcgccgcgcaactgcatgacctgtttgatgcccgccactaccgcctcgacgtcacccaggcgccgttgctgcgcctggtgcgcgctgaagacccggccaaccagcgcatcgtcgccaccctgttgttccatcacatggcgctcgaccacagcgccctggacgtggtgtgccacgagatgcaggcgtgcctgtcggggcaaggcgcggccctgggccaggccgtgccgtttcgcaactatgtggcgcaggcgcggctggggatcagtgagcaagagcatgaacgtttcttccggcagatgctcggcgatatcagcgagcctaccttgccgttcggtttgcaggatgtgcaaggcgatgcgcgcggtatcgctgaagtcagcctgccattggcgccggcattggcccagcgtttgcgcgtacaggcgcgccaacagggcgtgagcgctgccagcctgtttcatctgggctgggctcaagtgctggcggtgttggccggcaaggcccaggtggtgttcggcaccgtattgatggggcgcatgcagggcagccatgccaccgaccgcgccctgggcattttcatcaataccttgccgtttcgcgtggacgtggacgcccaggacgtgcgcaccgccgtcaaggccacccactcacggctgaccacgttgttgcgccatgaacacgcggcgttggccctggcccagcgttgcagtggcgtgctcgcgccgacgccgctgttcagcgcgctgctcaactatcgccacagcgcgtccgccgccagcgccgaggccgtgtcggcgtggcacggcatcaccgcactgcgcgccgaggaacgcaccaactacccgctgaccctgagcgtggacgacctgggcgagggcttcggcctgagtttgctggccagcaccctggtcgaccctcaacgcgtctgcgcctacctgcacaccgcgctggaaaacctggtgagcgcactggaacaggccccccataccgcgcttgaccaactgtcggtggtgcccgctgccgaacagcgtttgctgctggaacagttcaacaccacccagaccgtcttcccccaaggcaccaccctgcacggcagggtcgaagcccaggccgcgctcacgccgcacgccatcgccgcggtgcatcagggccggcaactgacctacgccgaactgaaccagcaagccaacctgctggcccatcatctgttggcactgggggtcaagcccgacgaccgcgtggcgattgtggcgcggcgcggcctcgataccctggccgggttgctggcgattctcaaggccggtgccggttatgtgccggtggacccgtcccacccggccgagcgtctccactatctgctcagcgacagtgcgccggtagccgtactcacccaacacgcgttgctggagcgcttgccggcgctggatgtgccggtgatcaacctcgaccgcttcacctggcagcaccattcggcgagcaaccccacaatcgccgtcggcccgacgaacctggcctatgtgatctacacctccggctccaccggcttgcccaaaggggtgatggtggaacaccacactgtcgccaacctggtggactggcattgcagcgccttcgacctgcgcgccggccggcacaccgccagtgttgccggtttcggctttgacgcgatggcctgggaagtgtggccggcgctgtgtgtgggcgccaccttgcacctgccaccggcccatgagggcggcgaagatatcgacgcactgctggcctggtggtgcgcgcagccattggacgtgagctttctgccgacgccggtggcggaatacgccttcagccagaacatcgagcacccgaccttgcgcaccttgctggtcggtggcgaccgcctgcgccagttcgggcgggcgcagcgctttgagctgatcaacaactacgggcccaccgaagccacggtggtggccacttccggcaaggtcgaggcgggccagccgttgcatatcggcaagcccatcgccaatgccaaggtctacgtgctcgacccacaccagcgcccggtgccgctgggggtggcgggggagttgtacgtgggcggcaaaggcgtggcacgcggttacctcaaccgcccggaactgaccgccgagcgttttgtgcgcgacccgttcaatgcagggcgcatgtaccgcaccggtgacctggtgcgctggttgccggacggcacgctcgactacctggggcgcaacgatgaccaagtgaaaatccgtggcgtgcgcatcgaactgggcgaaatcgaaacccagctcaaccaattgcccggcatcctcgaagcagtggcggtggtgcgtgaggaacggctggtggcctacttcaccgaaaacccacaactggacccgctgacgctggccgagattcgcgcccacctggtggcgcatctgcccgactacatggtgcctgtcgcgttcatgaagctcgacgcactgccactgacggccaatggcaagctcgaccgcaaggccctgccggcgccggacatggccgcggtatttacccgcgagtacgccgtgccccagggcgaaatcgaaaccgtgctggcgcagatctgggccgacgtgttgcaggtgccacgcgtggggcgttacgaccatttctttgagctgggcgggcattcgctgctggccatgcgcatggtgtctcaggtgcgccagcggctgggcgtcgaattggcgctgggcgacctgtttgccaacgctgaactggcggcggtcgccgaggtgctggcccaggccggtcgcagcaccttgccggatatcttgccggccaaccgtgatgacgacgtgccgctgtccttcgcccagcaacgcctgtggttcctggcgttgatggaaggggccaacaccgcctacaacattcccatcggcctgcggttgcgcgggcagttgcatgtacaggcgctgcaacgggccctggcgcgcattgtggcgcggcatgaaaccctgcgcagccgcttcgcccagcagggtgaccaggcccaggtgctggtcgtgccggccgaagaggtgttggcgctgcaagtgcaggacctgcgtcgccacccgcagccgcaacaggccctggacgcgctgatccacggcgaagcctcggcaccgttcgaccttgagcgcggcccgttgctgcgcgggcgcctggtggtgatggccgatgatcaccatgtgctgttgctgaccctgcaccatatcgtctccgacggctggtccatgggcgtgctgacccgcgagctgatggcgctgtaccaggctttcagccacggccacgccgacccgctgccgcccttgccgatccagtacgccgactttgccgtgtggcaacgcctgtggctgagcggcgaggtgctgcagcgccaaagcagctactggcaacaggcgttggccggtgcgccggcgttgctgaccttgcccaccgaccgcccgcgcccggcgcagcaggactacgctggcagcagtgtcgaagtgcgcctggatgagcgcctcaccgccgggctcaaggccttgagccaacgccatggcaccaccttgtacatgaccttgatgagcgcttgggcttcgctgttggcacgcttgtccgggcagcccgagttggtgatcggcacgccggtggccaaccgcatgcgcaccgaagtcgaagggctgattggcctgttcgtcaacaccctggcgctgcgtatcgacacctcgggcgagctgagcaccgaggcattgctggcgcgggtcaaggcgctgatcctgcaagcccaggcccatcaggacttgcccttcgagcaggtggtggaaattacccggccgccgcgcagcctggcccacagcccactgttccagaccctgctgagctggcaggacagcagcgcgccgaccctggccctgggcgacctggccctggagagcattgtcgagcacagccatttcgccaagttcgacctgtcgttgaacctgggcgaagtgcagggcagcatcctcggtgcgctggaatatgccgtggccctgtttgacgaatcgacgatgcagcgttacgtcggctacttcacccgcgtgttgcaggccatggtcgataacgaccaggcagtgctggcgcacgtgccgctggtggatgcgcgcgagcgtcggcaactgctggtggatttcaactccactgccgttagctacaacctcgaccagaccctgcacggcctgtttgaagcccaggtgctgcgcacgccccaggccattgccctgaaggcgggcgcgcagcaactgagctatgccgaactgaacacgcgtgccaaccaattggcccatcacctccaagccctgggtgtgcagccccaggcgcgggtggcgatctgcgtggagcgtggcctggacatggtcattggcctgtacgcgatcctcaaagccggcgccgcctatgtgccgctggacccggcctacccgctggaacgcatcacctacatgctgcacgacagcgcgccgacggtggtgctggcccaggccagcacccttgggttgctgggcgaggtcccggtggtcaacctcgattcacccacctggcagcaccagcccacccataacccgcaggcggccagcgtggcggcctatgtgatctacacctccggttccaccggccagcccaagggcgtgatcaacgaacaccctggggtggtcaaccgcctgctgtggatgcaggacgaatacgggctgaccgccagcgatacggtcttgcagaaaaccccgttcagcttcgacgtgtcggtgtgggagttcttctggccgctgttcactggcgcacgcttggtcatggcgcgcgctggcgggcataaagaccctgactacctgtgccaggtgatcgaggccgagcgggtcacaacgctgcattttgtgccgtcgatgctcgacgtgttcctggcccacggcgatgtcagccaggccgccgggctggtgcgggtgatgtgcagcggcgaagccctgccgggcagcctggtgcggcgcttcaagcagcaattgccggaggttggcttgtacaacctgtatggccccaccgaagcggcggtggatgtcaccgcatgggactgcgcgggtgccttggtgccggataacacgcccatcggcaagccgattgccaacacgcgcctgtatgtactggacgggcagttgcagccggtgccattgggggtggtcggtgaattgttcatcgcaggcgtgcaggtggcgcggggttacctcaaccgccctgagctgaccgccgaacgcttcctcgacgacccgttcaccccggggcgcatgtaccgcaccggtgacgtgagccgctacttgcctgacggcactctcgagtacctggggcgcaatgatgaccaggtgaagattcgtggcctgcgcatcgaactgggggaaatccaggcgcgcctgaccgagcatccagcggtgcaggaagctgccgtgattgcccgcgagcagcgcctgatcgcctattacaccggcgtgccgagcgaggtcgaaagcctgcgcgcccacctgctgcaacacctgccggaattcatgctgccggcgagctttgtgcatcttcaggtgctgccgctgagccccaacggcaagctcgaccgcaaggcgctgccggcgccgggcctggacgcgttgagtgtgcgcgactatgaagcgcccgtgggtgatacggaaatcaccctggccgcactgtgggctgaattgctcaacgtggagcgcgtgggccggcatgacaatttctttgaattgggtggccactcattgctggcagtcagcctgatggggcgcatgcgccgcctgggcttgtcggcagatgtaaaagtactgtttggccaaccgaccttgtccgccctggccgcggccttgggcggtgggcgtgaagtggcggtgccggccaatcgtatcgcggccgattgcacccggattacgccggacatgcttacgctgatcaccctggaccccgctgccatcgagcgcatcgtcgcctgcatccccggcggcgcggccaatgtgcaggacatctacccgctggcacccttgcaggccggcatcctgtatcagcatcgcgccgtgcagggagacgacgcctatgtgctgcaggcgcagtttgccttcgacagccgcctgcgcctggacgccttcgcccacgccttgcaggcggtgatccagcgccatgacatcctgcgttcatccttccactgggacgggctggaggagccggtgcaggtggtgtggcgcaccgcctcattacgggttgaaaacggcccggtgccgccacgcctggacctcgccaaggcacccttgatgcgcctggtgtatgccgaggagtcgcaacgggtggtggcgacgttgctgttccaccatctggtgatggaccacatcgcgttggacatcctgcaacacgaaatgcaggccttcctgttgggcacccaagacaccttggccgcgcccgtgccgtaccgcaactacgtggcccagactcgtctgggcgctgaggaccacgagacgtttttctgcgagatgctcgctgaggtcgacgaacccaccgacctaccgcacctgggcgccgatgagcgcgtgaaggtgagtctcgacctggggttgagtcggcgcctgcgcactcaggcgcgtcaagccggcgtcagcgccgccagccttatgcacctggcctgggcccatgtgctgggcacggtctgcgcccgtgaacaggtggtgttcggcacggtgatgctcggccgcctgcaaggtggcgaaggcgccgagcgtgccatgggcgtgtttatcaataccttgccgttgcgagtcgacctgggtgaacactcggtactgaccgcgctgcgtgccacccatgggcgcctgacccaactgctcagccatgaacacgcgcctttggcgctggcccagcgttgcagcggcgtaccgatggctacgccgttgttcagcgtgctgttcaactaccgccacagcgcgccccaggccgggggcgtggccgaggcgtggcagggggtcgaagtgctccagaccgaggagcacacccactacggcgtgtcggtgagcgtggatgacctgggtgaaggtttcagcctcacggccatggggcagggggcccgacgcttgggcgactacctgcataacgccttggcgcaggtggtgcaggcgttggaagagcgcagcgacatcgcgctcaatggcttgtcgatcctgccccaggccgaacgccagcaactgcttgagggcttcaacgtcacggcccgcgcgttcccccgtgaacacagcgtgcaacagctgttcgaagcccaggcccaggcgcgccccgatgcggtggcggtgctgcatggcgaacaacggataagctatggcgaactcaaccgccgcgccaaccgcctggcccatcacctgctcggcctgggtgtgtgccccggcgataacgtggcgatcctgctgccacgctcggtggcgttgttgatcagccaactggcgattctcaaatgcgccgccacctatgtgccgctggacatcaacgcgccggccgaacgccaggccttcatgctgcaagacagcggcgctgcctggctgttgaccggcagcgactgcagcgtggagagcgcgacgcagcgcctggacctggacaccctggcccttgactcacaccccgaccacaacccgggcctgccgcaatcctcgcacagcgtggcgtacatcatgtacacctccggctccaccggcatgcctaaaggcgtattggtgccgcaccgtggcatcacgcgcctggtgctcaacaacggctacgccgatttcaatccccatgaccgcgtggccttcgcttcgaacccggcgttcgatgccagcaccatggatgtgtggggggcattgctcaacggcggtcaggtgcaggtgatcgaccacgccaccttgctcgacccgctggcgtttggcgcggcacttcagggcgtgacggtgctgttcgtcaccacggcgctattcaaccaatatgtgcaactgattccccaggccctggccggcttgcgtattttgctgtgcggcggcgaacgtgccgacccggcggcgtttcgcaacctgctggcattggctccggggctgcgcctggtgcattgctacgggccgaccgaaaccaccacctacgccaccacttatgaggtgcacgcgcttaccgctgatgccgacagcgtgccggtaggacgacccatttccaacacgcaggtctacgtgctggatacgcagttgcagttgctgcctgtgggggcgaccggtgaaatctgcatcggcggcgacggtgtcgcccagggctacctgaaccgccctgaattgacggcggaaaagttcgtgcagaacccgttcagcccaggcgccttgctgtaccgcaccggcgacctcgggcgctggagcgcggacggcctgctggagtgcatcgggcgcaatgatgaccaagtgaagatccgcggcttccgcattgagctgggtgagatcgaagcaggcatggcgacattcgccggcattcgcgaaggggtggtgctggcccgcgaagacgtgccgggggacaaacgtctggtggcctatttcacctgggcgggcgagccggtcggcatcgagtcggtgcgcgcttacctgcaggcgcacttgccggcctacatggtgccctcggcctttgtcgcactggagcatttgccgttgacggccaatggcaaggtcgatcgcaaagccttgccgttaccgacgtgggacgcttcggccagcggcacatttgaagcaccggtcgatgcactggaacagaccttggcccagctgtgggccgaggtgctgaaacttgagccggtggggcgccatgacagtttctttgaactgggcgggcactccttgttggcgatgcgcctggtcaatcggctggacgaggccgggttgccggtgtcgctggccgagctgttcgagcatgccagcgtggcctcggtcgcggcgctgctgcgcctgcgcggtgacgacgtgctgcctgagacggcggtgatcacggtgcgcagccgtgggtcgcaggcaccgttatttctggtgcatgagttcagcggcatggacgtgtacttcccggcgcttggccagcacctgccgggcgattacccgatttatggcctgccgggcctggcgctgggcgaggcgcacttggacagcatggaaggcctggctgcgcgcatggtcgggctgattcgccagatccagccccacggcccttaccggctggcggggtggtcttttggtggcgtgctggcctatgaagttgccatgcagttgctggggcaggatgaggccgtggcgtttctcggcttgatcgacagctacgtgccgcgaatgaccgaccagggcaaagcgcgctggagcgggccggatgccctcaagcggcatttgttgttgcagtgcacggcctattggaaggcacagggaggtgtggatgagctggcgagcctggaccaactggaggcaggccttggacagctggacattgcggctttgctgcaacgctgtcgcgatcaaggtttgctatacgcgcaaatggcagcggcgacggacgccgacctgttgagctttttgcaacgggaagtcgggcatgggcatgccctggcccactacagcctgttcccgctgccgatcccggtgcacctgttcagcgccgagcagcggcccaccgaactgtcgcggcgcagtgccgcgctggggtgggacaccgccctggcgcctgggcaactgcgccaggtgcaggtgccgggggatcaccagagcatgatgcaggcgccgcatatccagagccttggccaggccatgagccaagcgctggcggcgagcaccccggtgagttgcgcggcgcactcacccttgctgcgcatccagagcgggtgcgccggttatgcaccggtgttctgcgtgccgggcgcgggagacagcgtcaccggctttgtcggcttgagcgaagctttggggcgcgactggccgctgtatggcttgcagccacgcgggctggatggcgaagcggtgccccatagccaggtggaagcggcggcccagtgttacctggccgcgctggaacaggaatgccccgaggggccggtgcatctggtggggcattcgttcggcggctgggtggcgctggaaatggcgttgcgcttgcaggcgatggggcgtgaggtgggctctttgacggtgatcgacagcgaggcgccggggcgtgcgagcaaggcttatacctcgacggcggcgttgttgcggttgatcgaggcgatgcagttggcggctgggaagtcgctggggattgatgctgtggactttgccgggcgcgatgaggtggcgcagcggcaagcgttgcatggggggatggtgagtgtggggttgttgccagcgcgtgcggcggtggaggcgatgaatgggccggcgcgtacttacgcggcggcgttgcgcacggtgtatcagccgcaggggcggtatgacggggtggtgcggctggtgttggcgcaggacccggcgctggatgcggcggggaaccagcgtgagcaggggttgatggttgaggggtggcgagggcaggggggtgggttgcaggtttggtatggcggggggaatcactttacgttgctcaaggcgccgaatgttttggggttggccaggtggtggttggaaggggtggctgtggaggttgtttcgtgaaggttgtaaacctgtctgaatgtgggagctggcttgcctgcgataacggtttgtctgcgtacatatccattcctgcggtaacggccacttatggttccgctctgacagcgggtcacttttggaaaggcccaaaagtaaccaaaaggccttcgccccaccactcggcacctcgcctaggctcggtgtgcccgaacgcagtttttgcagcgtgggccgccgcaatgggccatccctggcccagtgcggctaacccggcgtcctgccgggttacccacgctgcaaaacctgcgttcggccagcgtggtttaacggggcgattgcagatcaaaagcagagcgcggcggccttatagccgaccggtttttgaaggtgaactcggtgagatatgtgggggcaggcatgcccccggtaaccacgatgcgaagcgagccgctcttgatctgcttttgatcttaagcgccccgttaaaccacgctggccggaattcgacagtgattgggggggtaaaccggcagggatgccggtttagccgccccgcgccatggatggcgcgtggcggcggcccccnnnnnnnnnnnnnnnnnnnnnnnnnnnnnnnnnnnnnnnncaccagtgggatgaaatgcaccgcacccgcaagcccacgttcgtcctgtgtggcgagccccagggggatgtgctcaatctctatgttcacggttactcggcgttcttcaaccgccagcaactgggcaacttcaagcagcagttggcgggtatcgaaggttcgaccaacttgatgctgttctggccggcggggcattttctggaaaacctgtttgcaccgttcaaggacgtgctcgcctcgctgctcggcggtggcggcctgggcgcggcgacggtgggcgtgggcaaggctattgcctattttctcgaccattacaaaagtgtcgaggcacgggtggatgaagtggccaagaccttgttgcccgaactggccggctacctgcgcaaccaggcgctgccggtgcggcgcatcaacctgatcggccattccctgggcgcacgcattctggtcaagagcctgctggccagccccgagatcgctcgcgaattgccgttgaataacctgttgttgatgggcggcgcgatctgcacttcgagcccgtgggacgaagtgtcggcgccgctcaaggggcggctcatcaactgccattccagcaaggactgggcgctggccatgaagcccgataccgagcgttgcatcggtcgctatgcgattgacgtgacgcccgcgctcaaggccaaggtcaccaatgtgcacctggccagcttcgatcatgccgcctattggccgcagttgaagacggtggtgcagtacaccgatttgctgcaggagcggcgcggcatgatccgtgtggactcgcgcagcagtgacgtgcggtttgccgaagcggacggggacctgtacccggcgttggtgcaagcgcggccggaggagctgaagtttcttgccgaactgatggcgcaaaagcgcagtgccgcgattgatgccagtgtgcgtgagccgttgaaactggccattgaattgcagcgcatgggcggtgatagctttatgaacctggcccgtggccatggcgtgggctatcgccagattgccgaagatgtggcgcaacgcctgggtatcaaattcgatcaaccacttgagcacgtggcgcttgccgagatcgaagggcaggtcgcagaaacactgatcgagcagtacaaggacaaactcagccgcgctgatcgccaggcgttcgaggccgagctcaaggcggcggcacaaaaagagcaggggttgttcaaccgcttggatgtgggccgttcggctaccgcagccttgagcggcacggcgttggccgggctgaccgggtttatcctgcggcgcggtgcggcgacggcgattccggtagtgggccaggcgctggctgcggcgatgttgctggtcagcggggtgcgggcgttttccggcccggcgtattcgatcaccaccttggcggtactggtggtcggcgtgatccgccaacgcatggagcgcgaggcgctcaaccaggaactggagctggtggtgcaagtggtggaagcgtttgacctgccgcgagacacggtgatgcgcacggtcgcgtccgactgataagctgctgcccaagtcttgtgtatttgcctggaataccgcgtgaaattcagcctgccgaaaatcgctaccgctccgttttgcccgccggaagtggccggctctgtcgctgttgatcccaaggcctcgttttttaaacgggtgctgatgttcgctggccccggcctgttgatctccattggctacatggaccccggcaactgggcaacggccattgaggccggttcacgctacggctatagcctgttgtttgtggtgctgctggccagcctggcggggatggcggtgcaatgcctgtgttcacggctgggcatcgccactggcaaggacctggcgcaactgtgccgtgagcgctacagccagcgctctgctcgtacccagtgggtgttggcggaaatctccatcatcgccacagaccttgccgaagtgctcggctgcgccctggcgtttcacctgttgctgggcgtgtcgttgaccaccggcattgtcatcactgccttcgatacgctgttgatcctggccctgcaaaatcgtggttttcgccgcctcgaagcgatcatgctggcgctggtcgccaccatcggcgtgtgctttttcatcgaactggtgctgatcaaaccctactggcccgacgtgctcagcgggttcaccccgtcactgtcggccatcagcgatgcggcgccgttgtacctggccatcggcatcctcggcgctacggtcatgccccataacctctacctgcacacctctatcgtgcagacccgcctgatcggcaaggacctggcgagcaagcaggatgcagtcaagctggcgcgtatcgataccatcggctccctggccttggcgctgttggtcaacgccgcgatcctggtgctagccgcagcggccttctacaagaccggccataccgatgtggtggaaatccaggacgcctatcacctgctcgaccccctggtcggcggtgctttcgccagcatcctgttcggtatcgccttgcttgcttcgggccagagttcgacctttaccggcaccattgccggccaagtgatcatggagggttacctcaacctacgtataccttgctggcagcgccgcctgattacccgtgggctggcgttgatcccggcgtttctaggcgtatggctgatgggtgatgatgccatcggcaagctgctgattctcagccaggtggtactgagcctgcagttgccctttgcgttgtacccgttgatccgcatgaccggtgacaagcaattgatggggccgttcgtcaatcggctgcccacgcggctgctggcgtggtttctgttcgcggtgatcagtggggcgaatgcgtggttgattgggcagtggttgttctgacactgaggtgcattgccgaggcagtgcctacaccaagatggccaaggatgtgtattgggcaacttctgggtcagcagtcaatagcttcatcggctcagtcatggctgttgcaatgatcagccgatcgaagggatccttgtgatgatgttcaagatccctgacggcaatggcatgctccaggctgatgggtaattcgacgaagccactttccaggcagtattcgcgaattttatctaagtccacagcgagctttcccaagctaaccttgattgccatctcccaaaatgtcgccgcactgacgtaaatttcggcggcgttttctatcagcttgcgggctttaccggacagtttggagtcatcgttgagtgcccatagcaggatatgggtatccaacaatagcctcatgaatgactggcctcaaaggcatccaaaagatcgctggggagtggggcgtcgaagtcttcaggaatggtcaactcgcccttcattgcgccaattcgccggcccttggacttaccaagcgggacgagctgcgccattgcgcgaccatgtttggcgatagtgatgattttgccagcggcggcttcatcgaccagtttggacaggttgttttttgcctcaccgagggcaacggtaatcatgggggcttctccgtgttttggccaaatatagccaaaactacgaccgctatcaaagatggcacgaccactggcggccgctcgttcagcgcgggatggtgtgtggtacgtagtgaccatgaagtctctccaaataaatttggctaaagtctgccccagcgcaccgtccccagaaatactggccctcaaaatcagaacgggcctacgttttctactaggaatattccttcactggcgccgttcagcagcgtcaaaatccgtcaccgatcccaatacggcaccgtcccaaaacactccacgaaatagtcgatcaccgtgcgcaccttcaacgacagtctgcggctgcccggccacaacgcggcgatctgttggggctccagggttgtcgcgacctcgtactcactcagcaccgcctgcaaggtaccggcgcgcaggctttcgccaatcagccaggacggaaacaccaccaggcccaggccttgttcggcggcgtgggtgagggtgtcggcgtggttgccggtgatggggccgctgacgctgtaggcagtccagtcgccttggccgcggcggaagaaccagcgctgctgaccggtgatgcctttgtaggccaggcaatggtggtgggccagttcgtcagggtggcgcggcgtgccatgttgggccaggtaagcagggctggccgcgatgcgaaagcgttgcggcgcgaagatgcgcgcctgcatgcccgagtcattgagcacgccaatacgaaacagcaggtcggtgccatcttgcagcgggtcgacgaaggtgtcggtttgctggatatccagctgcaacttcgggtagcgccggcacagcgctcccagccagggtgcaaggtggcgctggccgaacaccatgggcgcgttgatgcgcaccaggccgctgggctcgctgtcttgctcctgcagggcctggttcgccgtctccaattgctccagtagcaagcgtgcgtggcggcccagcaggcggccggcttcggtggggctgacggcacgcgtatggcggtagagcaattgctggccgacggcctgctccatcagttgaatctgccgcgagatggaggagggcgccaggctttcacggcgggctacttcggaaaagctgccctggtccagcacggccacaaacaggcgtagcgccttgaaactcagttcattcaagccctgcatcatctctccaggctgtgcgttttgcgcaaaggtgttgtccgtataatcccatttatcgcacagcacggccaccggataatgcgcgccatgtttttctttcttgatacacgggtgatgtatgcaggcacgttctaccgaggggctggcgcaggccaggccgagcaataaccttttacggctgctgctgttgccgttggtgattctggcgggcatgggcctgtcggtggaggccgggttgcttgggccattgggcgcgcaggtcgggcatttgtgggcgacgttgagcatctttggcgttggcacggcggttctgttcttactgctgctgttcagcggcccgcaaaagggcccggccttcacgcaactgccgcgctggcagttgatcggcgggtttctggggccaatgtatgtagtggtgttgaccctggccacaccgcacatcggcatcgcgatgaccatgatcgcgatcctctcgggccaggtgggcaagagtgtgttgatcgaccacttcggctggttcggcacggcgcgcaaacgcgtcaatggcgagcgctggatcgcgttggcgttgattgtggcggctctggttctgattgcacgaggctaaggcgatgaatctgtttatgttgttggtggtggtgattgcagcaggggcggtgctgagtgtgcaggccgctattaatgggcgtctgggccagactgtgggggtgttgcgcagcagcctgttgaccttcgcggtgggcgcgctgaccacggcgctgttgatatttttcttcgagccggcccaggccgtcagcctgctggaggtgcccaagtggcaattgacgggtgccctgtttggcgtggtgtacatgatggtgatggtcggcgcggtgccggtggtcggtacggccgtcgccacggtggccgtgattgtcgggcaactgggcatgggcatgctgatcgacaacttcggctggctgggcaacccggcgatcgagctgtcgggcagccgtattctcgcgatgctgttgctcgccctggcgttggtgttcatgtaccgcagcaatagccgccgagccgactgacggcgctgaaccatgcctgcctgtccaaggtcactgcttaaggtgcggcgctcgctgcatcggacgaccatgaaaaaggagtctgaccatgccagatcaaacctgtgcttgccctcactgcaaatgtgtattgggcgctgacgcaatcatgaaagacggcaagggctattgctgccagggctgtgccgagcaccatgctcacggtgaaccctgcgccgccgcaacgggttgcgaatgcgccaagtcggcccacggttgacagcattgacctgcgggcccggatacccggtgcctgcagggtgagtaaaaacagttcgcttgcccgcggccagtctttaccatggcggcccatccttgattgatgtgtacccgccatggccctggccgcgcctcccgacctcactgatcacgccgttcccgtgcaaccgttggcgcgtacctacccgcgtggattatacgtagagccgcacagccacgattggggccaactgctctacgccatgagcggggtgatgtgggtcgagacgccccgcgaagccctggtagtgccgccccagcgtgcagtgtggttgccgccgggggtggagcacggcatccgcgtggtctccgatttgcagatgcgcaatatctacctgcgcccggcgttggcggcgacgctggacagccaggtgcaggtgatcgaagtgggccgcttgttgcgggagttgatcgtgaccttggtcgagcagggtgatcacggtgatgcggtttactatgacgctgtggtgggcctggccctgttggagttgcaacgcgcacggcgctcgcctattcgcatcgccatgccggtggcggcggatcgtcggctgatcaatgcgtgccaggcggtcatggcgtcgccctccctggacattccgttcgagcagcacgccgaggccgcgggcgccagcgtgcgcactttagcgcggctgttccagcagcacctgggcatggggtttgcccagtggcgccgtcaggtgcagttggctacggcggcggcggagttgatccagggccagtcggtgagcggcatagcgcacaccctgggctattcgcccagcagcttcagcgacatgttccgacgtgaactgggcgtgtcgccgtcccagtaccggggttggccgaaatcctgaagcacttggccgatacccacggtaggcgcgccctagactgagcctatcaatccaccgggcgcagccttcatgagctatttgatttccttggccatcggcctgtttgtcggcgtgatctacggcgcgctggacttccgttcaccggcaccgcctgctatcgcactggtcggcctgatgggcatgctgctcggcgaaaagctctggcccatgacgcgacagttggtcagtggttggttgtcctgatcccttttcccttcgacggatgccctcgatgaacgcactgcaatttaccgccaccggcgacctcgcccacctgagcctggtggaggtgcccgtgccggtgccgtctgccggcgaagtgctggtgcagattaacgctgcgggcctgaaccccagcgacgtgaaaaacgtgcttggccgcttcccctacaccacgctgccacgcatcccagggcgtgattttgccggcgtggtggtggaggggccgcaagcattgctcggccaggcagtctggggcaccggtcgcgacctgggttttttcgctgacggttcccatgcccaatacctgcgcgtatccgccaagggcgtggcgcacaaacccgcgcatttgagctttgcccaggcggccagcctcggcgtgccctataccaccgcctgggatgccctggagcgcagcggcgttggccagggcacgcgcttgctggtgattggcgccaacggtgcggtcggcagtgcggcgctggcgctggcgaagatacgcggcgcgcaggtgctggcggctgtgcgcaaggccgatcagctcgagttgttgcaggctcaagggttggacgcgattgccttgggcaagccagaggcgctgggcgcgcaagtgcaggccgtgttcaagggcggcgccgacgtgatctttgacaccaccggtttctggctgcctgccgcggtggcggggctggcaccgttcggccgcattgcgatcatcgccgccccggttgacggcctcgtgcagttaccggccctggcgctgtaccgtaagggcgggtcggtggtggggatcaactctttgctctatagctgcgaacaatgcgcggtgatgctggaggcgtttgggcgcttctttgatgaaggcctgttgccgctgcctacggggttgcgtgaagtggcgttggtggagggtgttcagtgctatgcagaagtgaacaacggcagcccagacaaaatcattttcctgccctgatgggatagaaatgtgggagcgggcttgctcgcgaatgcggtgcatcagtcacctatatatcgactgacactctgcattcgcgagcaagcccgctcccacaatgttgatctttattcggtttcgggaacgcctttttcccacgccgaccagttcttcacaatcgcttggaccaacgggttgcccgtgcggtacaggttttccagcgccggtacaaacccaccctgatcggcatacttgagcaggttgtccacttcgctgtagccagggtaaggccggtcaaagtcagagcctgcgcgcaccacggccagacgctggatatccaccaagccttcgcggctggcgcgtagcagcgcttcgtaggtggagttgtcctcctgttgggtggtgcagtattcgcctttgttgtcggtgagcaactgggtccagacttcggcacgttcgctcaaccgcgtgccggaaaaccaagtgttgcccgccagggtgtcgcagcgggtgacttgcggcggctggttggccggggcggcggggtagtgtttgcgccaggcggcggactctgtgctttctgtcagctccaccttgtgcgacaaggcaaacgccttggcttgcagcttttggttgagctcaaacacttcggtcttgtagtccagcggaggtttttcgttgggccccttggtgttgatcccgatatagcccgtcggccagtccttgggcgcatcccgtgaatccagctcccactgcgtgccgaactccaccaggtaatgggcccaggcggcggtaccgatggtgccgtgcttggggttgatgccggcgatcccggcgatcaggaagtagctctggcgcaggtcgaacttgggcgacaaggccagggccagggtagatgcggcagcgttggtctggcccatgccggtcaccagcaggcacacgtcctggttgttgcagcgaatcactggatattcggcggacaagcctggaacgcgtacctcttgtttaagttcgaggcggtcgatccaggtttgcgcctcgggggcaaacatggtgatcagcatcaccttgggtttgatcggtgctgggctatccgccagcaccatgtggggcaatagggccaggccgacggccagcgagacacgggtcaatgcgttcatctacagctccttgatcagaattgatagcccacgccggcgtagtaaccccagccgtctgagcgtgcgcggaagttgccttcgccgaaattcaactcgctgccgtcctcccagttgccgccgttgtgaaagtaacggccgaccagggtaaagcgcagatgggtaaacgagtacagcaacacgttggtggccaccagggaattggcggtgcgcgccgggttgtccttgtgcaggtccgagccgaaatcgtagttggtgaaaccgatgtaggtcagcgaggcgccgttgtcgaacttgccgatgggcacgatgtacttcatctgcgctcggtagccgtcccaggaatactcattactggcgccgtagttttcccactggtagcgcccatagaagttggccgacaggttgacccgcgagtgggtgtcgatatcggtgcccaggccgctgtacagagtgttggcgcggttttccttgcggctgccgtggtcgtagatccagtcaaaggccacataccattccttgaatgggccaattgccaggctgcgtcctgcgaggtagtcgatggagatccgcggttcatgctccatgaacaccggcgagccatggtcccacacgcctttgtcattactgttgccgatggtgagaatcttcggcacatcgatatagccgtacaactcaaaggggcccttgcgcccgaagtactcgtattccagatagacgtcatcctgtggcttgggaccgaaactgatgtctttgctgccgatcagcgtgaggtcctggttgaaccactcggacaaatagacgccttttttcgtcggcgggttggcttcagggctgagggtttcgccctgtgctgagtcatcgatgggcttttcctgcgccaaaatgggtgcactgagtactcccgtaacggcggccagtagcaacgaaacgccgagaccagcacgaggctttgaggtggggtgcattgaaagtccttattcttacgcggtttaaacccgattcgacggggaggagtgaacttagcggtcaagttcgttccgcaaacgtttgcacaggctgtaccaacttgggtcaatggcttgaactgtttagaaaaaagtcgaatttgccgacgctttggtcaggaaaacagtgggatttctgtcatcctgacgcgccaaccctttggaggaacccgatgttcgaacactacctgcgtgcctggaacctgagtgtcgatggagagcctatcgtcacaccgggcagccacctcttgccggtgcgctggaaaggcgtgccggcgatgctgaaaattgcccatacgcctgaggaaaaactcggcggccgcctgttgagctggtgggcaggtgacggcgcggcacgcgtattcgcccatgaccacaacgccgtgttgatggaacgcgccacggggccaggttccttgatgcgcatggccctcaatggccaggacgacgaagccagccagatagcctgcgccaccctggcccggctgcattcgcctcgtgcgtcgccgcccgaagggttggtggggctggacgagtggttcagttccttgtggcacgccgccgagcaggagggtggcgccttacgcgactgcgcggtaatggcccgcacattgctggctgcgcaacaggaggtggtggtactgcatggtgattgccatcacgacaatatcctcgactttggctctcggggctggctggcgattgatccaaagcgggtgatgggcgagcgcggttacgattacgctaatttgatctgcaacccggatttgccgaccagtagcgacccgctgcgtttcagccgccaggtcggggttatcgccttggcggcgggtctctcgcgtccacgcttgttgcaatgggtggtggctcatgccgggttgtccgccgcctggtttctggaagaccaggagcgcgaccgtgccatgaatgagttgcaggttgctcgcctggcacaacgggaactggctcagttgaataattgaagtgcggcctgccgccggtattcactcggcgtctggtgcatttcgatacgaaagtggcggttgaaattcgacaggttggcgtagcccacctcaaagcagatgtccgccactgacatctggctgtgcaacagcaagcggcaggcacgctgcacccggaacttgcgcatcaggtcgataaagccatggccggtgttgcgcttgaaaaaccgcgaaaagcccggttcgctcatgtccaattgccgggcgatatccgacaggcgtacatcgccggtcaactcccgcatcaggtagtcaaacgccttgttgatacgttcggcgctgcgcgcatccagggtcggtgcgtagcacgggctggccagggtattggcctgtgcaggcggtgcgttcttcagggtgtcgagcagttgcaggaacagggtcaggcgttgcaacccatgggcgctgccgatggcctccatcagccctgccgcgctcgttgcggtctcgccggtgaattctatgccccgtcgcgcccgtgcaaacagtgactgtaaatcaccgagctcaggcagggtggtgcgcagggcgagcagggcggcgccgtcgaattgcagtaccacatcgcgtccgtgctggtattcgccgggggccaggtcaccgatccagtcgtggggcaggccagggccgatcagcgcgacatgcccggcgctgaacgcaccgatatagtcgcccgccaccagcttgccgctgccttggcggatcaggtggatttcgaattcaggatgatggttccagcgcgccaattcatagggatagtcatgttcgaaccagcgaaagccgtgttccggttcgggcaggatcacctcaagctccgcagggcggtgctcgaacagggtggcggggctgatgggcatggtgctgcctcttgtgatggtgcaattttcccaaaataccctcactggcaatcggtgcgctagccccggtttcgcctgagactgatacttttttgatcctgtgcctcaggttaaaaaagtatcagcctcgcattcgccagccgtttgtgacgcggcaggccaagctgctgtaatcgaggctcaacaacaaggggcggcaagctgttctcggcgacgctcaccggctaccggcaataactttttcaggagaccccatgaaacgactcgaaggtaaaagcgcgctgatcaccggatcggcgcgtggcattggccgtgcgtttgcccaggcctacatcgctgaaggcgccacggtagccattgccgacatcaacctgcaacaggcccaagccaccgccgccgaactggggccgcaggcttacgccgtggcgatggacgtcaccgaccaagcctccatcgacgcggccgtcgccacggtggtgagccatgcgggcaagctcgatatcctgatcaacaacgccgccctgttcgacctggcccccatcgtcgacatcacccgcgacagctttgaacggctgttctcgatcaacgtcgccggcaccctgttcaccctgcaggccgcagcccggcagatgatcagccaagggcatggcggcaagatcatcaacatggccagccaggccgggcggcgcggcgagccgttggtagcggtctattgcgcgaccaaggcggcggtgatcagcctgacgcaatcgtcggggttgaacctgatcaagcaaggcatcaatgtgaatgccatcgcccccggtgtggtggacggtgagcattgggatggggtggatgcgctgttcgccaggcatgaagggctggcgcctggcgagaagaaaaagcgcgtaggggatgaggtgccgtttgggcggatgggcacggcgcaagacctgaccggcatggcgatcttcctggcgtcgaaggacgccgattatgtggtggcccagacctataacgttgatggcggcaattggatgaactagtgtttgacgctgacccaactgtgggagctggcttgcctgcgatagcgctggtggattcactccaatcatcgcaggcaagccagctcccacctttgaacttcagcgttcttgagaataggtgagtcagcaaagcatcgatccccgcagtaaactgtcccatacttcaagatttctacgctcgccctcaggcgctcgtacgtgcagaccacccgagaacgaccatgagcctttcgaaagctgccatcgcttcattcgacgtcgacgcccagaagagcttcacgcctttatgccccgacgagttgccagtggccggtggcgaccacattggtgccgaactcaactacatggccagcctcgccggccaccgcatcggcagcaaggatgcccacaccccccacgcgccctgggtggtcgcgcaacacagcgagatgctgcaacccaccggcctggtccatgccgacgtgacctgggtcagccactgcgtgccgggcaccgaggggttcaccttgctcgatgagttgcccacgccctatgactacgactacttcatctggaaaggggtcgagcccgacctgcacccctacggcgcctgttaccacgacctgcacgacaaactgtccaccggcgtcatcgagtacctcaaggcccacggcgtggcccgcgtgatcgtcggcggcctggcgctggattactgcgtcaagaccaccgcgttgcaattgctcaaggccggcttgcacgttgttctgcatttgccggcgtgccgaggcatcagcgaggagggcggtgtacaggctgtcgacgaattgctcaaggccggtgcacacgtcagtcgcacccgcgaagaactggccctgattgcgcagggctaagcctcaacgctcaatcgaccgactccaccgcgcattccactgcggccgtgcctggttgacctggtcccaatcaatcgaaatggcggtctgcagataaccctgcatggcctccacccgcgcccgggttttgtcggtggtgggtgtggtcgggttcgacgggatctggtcaccttcttccaacgccggcgcctgggcctcggcggtcagcaaaaacgctgcgagcttctgcgccagttccggctggtcattgcgcgctatcacgcattcggccacgttgagcaccaccgcaccttctttgggctgcgagtactccatcggtatgccgagcagcttttgtgtggcgacctgggtcggggtcagggggaagatcgcggcctcatcggtctgcaccatctcggagattttcgcggagctggcgatgtattccagcacattggggccaacggtcttaggccaggccttgaagcccggttccacattggtttcgtcgccaccctggatgcggttgaacatcaggaagccatgcaggccgaaggtggaggaggccagggactggaacactactttgtccttgaagcgcgggtcggccaggtccatccatgaggtgggcgcggcccagcctttgtccttgaacatcttggcgttgtagccaaggccagtgacgcccagggtcacggccacggcctcgtccttgattcgggccttggccgggatctgttccagcggcgggctcggcgcgagcttgtcgcacaggcccatggagatggcgcggtacatgatgccgtcgtcgaggaacatcacatgcatctgtgggttggccttgttggcctggaccttggcgaggatgtccgaggaggtgccgggtacgatcacgaccttgacgttattggccttttcgaaggcgggcagcaccttgtcggcgtacacccgttccatggtgccgccgttcatgcccaggtacagcgtgggggcggcatgggccgtgccggtcagcaaggcgagggacaagcaggacaacgcgagacgtgattgcatggagtttttcctctcaggcttggaaacgacggatggaaaacgcttcgatgggttggcggctggtgccgtcgcagacgatctctgccaaggcttcaccgacggcggggccgagctggaacccggcgccggcaaagccgaaaccgtggagcaggccgggttgggtactactggggccgatcaccggttcgtggtcgggcaggtaaccttcggtgccactccaggtgcgaatggcctgggcaccctggagaaacgggtagagttcgccggcattacgcagaatctccagcaccgctgcctggcccggcctggcctgctgcgggcccagggcaaagccgcgcccgccaccgagaatgcaattgccgcgggcgacttgccgcgcatagatgccgccaccctcgacgccggtgctgacggtcatcacccccggcagcggctcggtgaccagcatcgccgggtgcgccgagatgatcggcaccggctcgcccaattgcgctgcgaccttgccggcccaggcgcccgcgcagttgagcagccacggcgcttgcaagtgcaggccgttggcgcagtgcacctggaatagccggctgtcgtgctcgatgccgattacctcggcttgctcgtacaccgcagcgccatggcgctgggcggcacgggcaaaggccggggccaccaggcgcgggttggcatgcccgtcatcggggcacaacgaggcgcccactgccacgtcgcccacccaggggaaacgcctgcgtaactcgctgcggtccagcagttgcaggcccaggtcgaagccacgggtctgctcggcgtaggcttgcagtgcggcaaaatccccaaggctgcgcgccagcttcaaatgcccggagcgcacgtattcaccctcgataccaatcaacccgggcaggtcggcccacagttgatgggcgcgctgcgacagcggcaactgatgcaagggccgcccctggcgccgcacgccgccgtaattgacgccgctggaatgcgagccacaaaaatcccgttctaccagtgccacccgctggcctttttgcgcgagaatcaaggccgccgaagccccgacgatgccgccccccaagacgattgcgtcgatcatggctgcacccgcacgccaaacggcagcggcttgatcggcgcctggccccgcaagcgcccgatctgggggaggtcgcggccgctgcgctcggcgacgatttccgccgccgccagcccgcacatccgcccctggcagcggcccatgccgacgcggcaatgggctttgacccggttgatttcccagtggccttcatccaccacggcgcgcacctcgccgacgctgacctcttcgcagcggcacaggatcagttcgtctggcgcttgcgcggcccagtgctcagggaaggggaacgcggtttccaggccctggcgaaagtgctggatacgcgccaactgccgctccagtgtggcccggcggtgttggtcgaccacgacaccggtatccttcagcagcgctagcgcggcgcattcgccggccatgtgcgcggcatcggcgcccatgatgccggcgccgtcgcccgccaggtacaccccttcgacactgctgcgcccggcgctgtcacgttgcggcagccaggcgcgattgagcgggttccaggcaaactcacagccgagcagatcggccaattgcgtttcgctgcgcagggcatgggcgaaggctaccgcatcgcatggcagggtctgttcgccgaagcgaatgccacgcacccgttggtcgccgtcgatctgcttgagcattgcgccctgatgcacggcaatcccgtgggcggtcagccaggcgcggtaatacatgcctttggccagggtcgccggttgcctgagcagcgctggcaaggcccggcattgagcgctcagcggcgcactgtcaagcaccgccagcaccttggcaccggcctttgcgtattggtacgcgactaaatagagcagcggcccggagccacaaaacaccacgcgttcgccaatagcgcaaccttggtacttcaaggcgatttgtgccgcgcccaggctgtagacaccgggcaatgtccagcccggcacaggcaggatgcggtcggtggcgccggtggcgactatcacctgcgcgtattcgaggctgtcggcgcgcccgttattgagcatgtccaggcgaccgtcctcggcgttccacaccaaggtatcgggccgatagtcgatcaaggctgccagttcatccatggtgcggtgcacggcttgggccttgcgcgcttcaaacccgtagacctgcctggcggtgcgttgaaaccctggaggttggcgccgataaatctgcccgccaccgcgcgggctctcatccaccaggcacggtgtgatgccatggtcgagcaaggtgcgcgccgcgctgattcccgccgggcctgctcccactatcactaccggcttcatggctggcgccccggatcacggctgatcgcctggccttcttccagcagggtcgaacaggcgcgcacccgccgcccatcggccaggcgcacccaacaatcctggcacgcgcccatcaggcaaaacccggcgcggcgctcggcactgaaatcgctgctgcgcaggtgctcggcgcaggtcagtatggcggtcagcagggtatcgccgagcaaccctgtggcgggctggccgtcaagggtgaaggccagggcagggcgttgggtttcgctcagtcgcttgaacaaggccatcagtgtttccccaccagcacgcggtccaggccgtagacccggtcgagcacaatcatggtcgctgccgtcagtgcgatgaccagcgccgacacggccgccatcatcgggtcgatggactcggtggcgtacacgtacatgcgcaccggcagggtttgcgtggccggtgagctgacgaaaatcgacagggtcacttcatcgaaactgttgatgaacgccagcaaccacccaccggccacaccgggcaaaatcatcggcagggtgatctgccggaacagcgtaaagcgcccggcgccgagggattcggcggcctgctcggcactgcgatcaatgccgatggccgccgccaataccaggcgcaacacatagggggtgatgatcactacgtgtgcgagcatcagccaggtaaagctgccgttcacgcccatcagcgcaaacaggcgcagcatcgccacccccagcaccaggtgcggaatgatgatgggcgacaggaacagcgcactgaagaagttgcgccccgggaacgaatagcgactgatcgccagggccgccggcaccgcgatcagggtcgccagggtggcggcagtgaaggccaggatcaggctgttgtagaacgcctggataaagtcggcgcgttcgaacaccgcgcgaaaccagcgcagggagaagcccgacgtgggcaggctcaaggtgttctctggtgtgaatgccaccaggcacaccaccaccagtggcgccatcatgaacagcaccaccacggcatggaaaccgagggccaaaggaccatttctggacatgcgcttaaactcccagggactttttgtagcggccttcgaccatgcggttccagctcagcatgatcagcagattgaccaacagcagcgccaccgcgagggtcgcgcccatgggccagttgagttccgagaggtattggtcgtacaccacggtggcgaccatcttcaggcgtcgcccacccagcagaccggggatcgcaaaggagctggcagccaaaccgaacacgatcagggtgccggacagcacaccgggcatcacttggggcagcacgatcttgcgcatcaccgtggcttggctggcgcccagggacaacgccgcctgttcggccgaggggtcgagtttttgcagcgaggtccacaccgggataatcatgaacggcagcatcacgtgcaccaacgcaatgatcacggcgaacggcgtatacagaagcttcatcgggcgcccgccgagggcctggatcacctggttgaccaggccgtcggcgccgagcaacaggctccagccaaacgcacgcaccaccaccgaaatcagcagcggcgtgaggatcacgatcaggaagatcgagcgccacggcgtgcccatgcggctgagaatgtaggcctccggtacgccgatcaccacgcacagcagcgttaccagggcactgatccagaacgtgcgccagaaaatctcgtagaagtaggcgtcgctcaacagcgccccgtaatgggccagggtccactcatcggccttcacgcccacttggtagtcgaacacattgaacgacagcaccagggtcaggcccagcggcatgatcaaaagcccggcaaacagcaccagtgcaggcagcgagagcaggtaaccacgactcatgggtgcacctcatcggtcgccagtacgcgcagcaaatcggcctgccattgcaggcccaccgccgcgccgttagccaagggcgcgctgccgtcgttactgcgcacaacggtgatttcgccaagggcggtgtggacgcggtacagccattggctgccgaaaaagtagcggtccagcactgtgcctggcattcgcccagtgcccgcgtccaccagttggattttttccgggcgcaggctcagggtcagttcgcctttgccaccgtcatggcgcacttgagggatgccgagcgcgtcgtaatcgccggccagcagattggccttgcccacgaagtctgagataaaacgcgtgcgcgggtgctcatagagcttgtaaggcgcgtcgatctgggtcacacgcccggcctgcatcaccaccacacggtcgctgatggacagggcttcggcctggtcatgggtgaccatcagggtggtaatacctaccgcgcactggatacgtcggatttcaaattgcatctcttcgcgcaggttggcgtcgaggttggacagcggctcatcgagcaacaacaccggcggttcgatcaccagcgcacgggccagggccacgcgctgacgctggccaccggacagctcacgggggtagcgctcggcatgttgggccaggcgcaccagctccagcacgctgttgacgcgggtggcgatgtcggccgctggcaccttgcgcatcttcaggccgaaggcgacgttgtcgcgcacgctcatatgcgggaacagcgcgtagctctgaaacaccacgcccaggccacggctggccggtttggcgtgggtaatgtcgcgaccgtcgagcaggatctggccaccgctgacgtcgacgaaaccggcgatcatttgcagggtggtggtcttgccacagcctgaagggccgagcagggaaacgaattcgccttgttccaccgccagatcagtggcgaccaccgcgtcgacggcgccatagcgtttgctcaaggccttgagttggagaaatgccatgtctgctttccacctttattcagtcgcgtcaaatacgcgctttcttgttttgggcagatgcgaaaagtgcggtgccggtgcgttggcgctcgatctcaagtcggctgccggttgttgttcatttcgcccctgtggacgcagattaggacgaagactaggatgggtggaagatagaatttcactcagcggactactattttaatatttattcattgagcagaattattagcgagattaggtgttatggattccattgagcggaataacggcggcaaggatatcggtgcgggcagcgtgtcccgattgtttgccgtgctgcgagccttgggggaggtgccggaggggggcgagcgggttacccagctcgcccaacaggtgggcttgtcccaacccaccactcatcgcctgctgcgcagccttatggaggaaggcatggttgagcaggatgtgcgcagcaaacgctatcgcctgagcctggagttcttcgcgttggcggccaacgcaggcaagaccggtaacctgcgcgacctggtgcgccccagcctgttgcgcctgagcgcttcgctgggcgactcgctcttcttgctggcgcgctcaggcttcgacgccatttgcctggaccgcagcgagggcccgtacccgatccgtaccttcaccggtgatataggcgggcgcgtggccctgggcgtggggcagggcagcctggcgatcctggcgtttttgccggaagaggagcgcgagactgtgatccgctacaacctgccacggctcaaggatttccacctgtatgacgaagtgctgctgcgctccgaagtggagagtgtgcgcaacctgggttatgcggcacgcaacaccggtgtgctggaaggcatggcggggctggcggtgccgattctcaaccgagacgggtacgcggtcgcggcattgagcgtggcgaccatcagcgaccgtctgggaccgagccgcttgccgatggtggtggagttgctcaagcgcgaggcggcggccatcgggccgcggctcaatccgtttgatccgacattgcacaggccgtcgcaaacctttggtggttaagtcaagccctcacaacagcatattggatccagttacggtataaccctgagacgctttcgtgattcgaggccccatttttcatgcaaaaccctttgcaacgtccgctgtggcaaatctatctgttgttcctggcaccgatggtgctgtccaatttcctgcagagcttttccggcaccctcaacggcatttacgtcggccagatgctgggcacccaggccttggccgcggtgtcggggatgtttcccatcgtgtttttctttatcgccctggtgatcggcctgggggcgggcgcctcggtgttgatcggccaggcatggggcgcccaggagaccggaatggtcaaggtgattaccggtgccaccctgaccttgggcgcgttggtgggcctggtggccgctgtgctgggcagcctgtttgcgcgcccggcattgcaggcgttgggcacgccggtcgatgtgctcgacgatgcggtgggctacgcccagatgatgatgttgatcatgccgttgctgctggtgttcatcctctatacccaactgttgcgtggggtcagcgacacgatttcgccgttgctggcattgatggtctcgaccctggtgggcttgctgctgacgcctgcgctgattcgcggctggatcggcctgccacccatgggcatccagagtgcggtgtatgccgggctggtgggcaacgccttggcaatgctgtttttggtcctgcgcctgcgccacaaaaaccacgtgatggcgccagaccgcgagctgcttgcggccttgcgcctggaccgcgtcatcctcggcaaagtcctgcgtatcggcctgccgacgggcttgcagatggtggtgttgtcgctgtcggaactggtcatcctggccttggtcaacggccacggttcccaggccacggcggcctatggcgcggtgacgcagatcgtcaactatgtgcagttcccggcgctgtcgattgccattaccgcctcgatcctcggcgcccaggcgattggcgccgggcgcctggagcgtatcgggccgatcctgcgcacggggctggtgatcaacctgtgccttaccggtggcttgatcgtgctcggctatgggctgtcccactggttgctgggcctgttcatcaccgacgacagcgcacgggtgcgggccgaacacctgctgcacatcatgctctggagcatcctcgtatttggcttccaggcggtgattggcggcatcatgcgcgccagcggcgtggtgctgatgccggtggcgatctcgatcttctgcgtgcttggcgtggaactgccgatggcctatctgttcaacgcccactttggattggaaggggtgtggatggcatttccggtgacctacctggcgatgctggtattgcagatcgcctattaccgcttggtgtggcggcataagcagatcaagcggttggtgtgaggctcaacccctgcaagagcagctccaggccttgcaagccttcctccagccgtgtgctcgggtgttcatcgcgggcaatccacaacgcggtattgaccaggctgccgttgatcaactgcgccagtgcgtggctgggggccgtaggcatcaggtccgcttgcatcagggcctccagcaattggcgcaaggactccacgcagtgttgctgggagccggtgtcgcccagtaccgccggggcatcctgcaatacaatgcgctggatttccgggtcctgggccatgcgcagataagcccggcagcgctcgcaaaaaccactccaaggctctacggcctgctccgagatgcgttgcaagcgcgcgtccatctcgctgtccagttgagcgaccaccgccgccagcagccctttcttgtcaccaaagtggtgatacagcgcaccgcgcgtcaggccggcacgggcagtaaagtcatccatcgaggtattggcatagccttgggtggcgaaggcccggcgtgcgctcgctatcaggcgggcgcgggtgtcttcgatcatttcagctcgggctcggctcatgggcgtctcttggctaagtgattgacatacgctgcgtatgcgaagcatgatctgccacatacgcaccgtatgtattctgccctgatggtttcagatagcaagcccagggcgtcgagcaagaggtcaagcaggatggcaaacccctacgctgaattattccaggtccccggtgccagggcctttgtactcgccggcatgctggcacgcatgccgatatccatgaccggcatcggcctgattaccatgctgtcccaggtacatggaggctatggcctggccggttcggtggcggcggtgtttgccctggccacggcgatttgcgcgccgcaagtgtcacgttgggtagaccgctacggccagggcagggtgctgccggttgcggcgctgatcggcggcggggcgctattgatgttgctgctgtgtacgcggttgcaggcgccgaattggacgctgtttctgttcgccgcgctggcgggctgcatgcccaatatgtccgctatggtgcgggcgcgctggaccgagttgtaccgtggccagcccaggctgcaaaccgcgtttgccctggagtcggtactcgatgaggtgtgcttcatcatcggcccgcctatttcggtggggttgagcgtggcggtgttcccagaagccgggcccttggtggcggcgctgttgctggcggtgggcgtcaccacctttgtgctgcaacggcaaaccgaaccaccgatacacgcgcatcaaggcgcgcacggtcgctggctgattgcttcgccatcggtattgatcctgatgattttgctgctggccatgggcgtgattgtcggcgtggtggatgtggtcagcgtggccttcgcccagcatcagggccagccggcggcggcgagtatcgtgctgtcggtgtatgccattggttcgtgcctggccgggttggccttcggtgccctcaagctcaaggcaccgttgccacgtcagttcctgtactgcggcgtagccacggcgttgaccaccttgcccttgctgctggtgagcaatattcccggcttggccgctgccatctttatctccgggttgttcttcgcgcccaccttgattgtgtcgatggccatggtggagcagatcgtcccggccagccgcctgaccgaaggcatgacctggctgatcaccggcctgagcatcggcgtggccattggcgctgccagttcggggtggatgatcgaccattttggtgccaccagcgggttctgggtggcgctggcggcgggggcggtggtagcgggctcggcggtattgggttaccggcgattaggatagtcagccaatcgtcgggcatggctctgggtagtgatgctgcagaaattcgttcagcgcttgacgcgtgagatcattcaacgtcactttcttacgggttgccgccagggctgcggccagatgcaagtcatgcccgacgcgtacgttgaatgaacctttgcacggtttctccggcgtttggcccaggctctggcaagtggctagataatcatccacggcttcacggaaagccgtgtccagttcagcgacggtcttgccttcgtagctcaccagcgccttgatgaagaggatcttgccgaacaggcagttgtcttcgaggctggcttcgatggagccgatgtagcctttgtgtttcagttggttattcatggaatcagttctcctgatttcaattgttcgatgatctggcgccgaatgtagtgtttcagttcgttgccggggtgaggcttgtgcagggtgatcattgcactggggtcgcccatgtcgaacttgacccggcttccggccccttcaatctgtgtgtatcccaatcggcgtaataacgtgacgagctcagaccaagtaaatgccatgtgctcattgagcagtttggcgagcagcttttcatttttggacacggcgttccctgcgtgtaactaaatgtagttgcaaaaagtggtgttcgtcaatgctagcccaggttcgcgtcgcttcccggggattgatgtaacccccgatgacagctcactcgacgcccccatccccccgctaatttttctccgcccggttcgttttatagggacgacgtgcctttgtgcttcccgcctattgccccggattccaagaaatgaatgctgaagactccttgaaacttgctcgccggtttatcgggctgcccctggaaaaacgccaattgttcctgcaagccttgcagaaagaaggcgtggatttttcaaggtttccgattccggcaggggtggaggtggaggaccgccaggcgctgtcctacgcacagcagcgcatgtggtttctatggcagttggacccggccagtggcgcctacaatttgcccggcgcggtgcgtttaagtggcgtgttgagcctgccagcgctggagcaagcgttcgccagcctggtggcgcgtcacgaaaccctgcgcacagtgttccagcgtcaggccgatgagcggctggcgcaggtggcggtggagccgtcggtggccgtcgagcacctggacttcaccgccttggcctttgatgcgcgggagcaggccgtcaacgccgccgccacccgtcaatcgctgttgccgttcgacctggaacatgggccactgctgcgcgtgcaactgctcaagcttgccgagcaggaacacgtgctgctgctgaccctgcaccacatcgtctccgacggttggtcgatgaatgtgctgatcgacgaattcatccgttgctatgacgcccacgagcgcgacgaagcgccccaactgccggcgctgcccatccaatacagcgactacgccctgtggcagcgccgctggctggaagcgggcgagcaggcgcgccaattggaatattggcaggcccgcctgggtgatgagcatccggtgctggaactgcccactgatcacccacgccccgcgatgcccagctaccagggcacacggcataacttcgcgattgagccggcactggccgcgcaactgcgcagttgcgcgcaaaaacacaacgtcaccctgttcatgctgctgctcggtgccttcaatgtgctgttgcaccgctataccggccaaagcgacattcgcgtcggtgtgccgattgccaatcgcaatcgcaccgaagtcgagggcctgatcggtttcttcgtcaacacccaggtgttgcgcaccgaactgactgggcaaacgcgggttgccgagttgctgcaaggtatcaaggagcatgccctgggcgcccaggctcatcaggaattgccctttgaacgtctggtggaagcgctgaaaatcgagcgcagcctgagccacacgccgctgtttcaggtgatgtataaccatcagccggtagtcgccgacatcgcctcggtcagtaccgcatcgggtctggaattggccctggtggaatggcaaggccgcaccacccagttcgacctgaccctggacacctatgaaaagtccggcaccctgcatgccgcgctgacctacgccaatgacttgttcgatacgcccaccatcgagcgcatggcccggcattggatcagcctgttgcaagccatggtgctcgatggcgaacagcgcattggcgaattgcccatgcttgacgcggctgaacagcaacggttgctccacacctggaaccagaccgccgaggcgtacccgaccgagcgcggcattcatcacctgatcgaagaccaggcacggcgcagccccgatgctccggcactggtgttcggtaccaccaccttgacctacgcccaactggatgcgcgcgccaaccaattggcccatgccctgggcgagcagggcgtagggcccgacgtattggtgggtatctgcatcgagcgctccatcgaaatggtggttggcctgctggcgattctcaaggccggtggcgcctacgtgcccctcgaccctgagtacccccaggaacgcctggcctacatgatcgaagacagtggcattcagttgttactcagccagcagagcctgctggcgtcgctgcccgtcgccggtatccaggtgattgccctggaccagccggcgctatggctcgacggatacagcagcgaatcgccgaacgtggccctgcatgccctgaacctggcctatgtgatctacacctcgggctccaccggcaagcccaaaggcgctggcaacagccatcgcgcgttggtcaaccgcttgagctggatgcaacaggcgtatggcctgggtgccaatgacgcggtcttgcagaaaaccccattcagctttgatgtgtcggtgtgggagttcttctggccgctgatgagcggcgcacgcctggtggtcgcggcgcctggcgagcaccgtgaaccggcgcgcctgattgacaccattggccggcacgccatcaccaccttgcacttcgtgccgtcgatgttgcaggcgtttatccatgagccgggcgtacaggcgtgcgcgagcctcgcgcgcattgtgtgcagcggcgaagccttgcccctggatgcgcaacagcaagtgttcgccaagttgcccgctgcggcgctgtacaacctctatggcccgaccgaggcggccatcgacgtcacgcactggacctgcattgacgaaggcgtcgacagcgtgcccatcggccgccccatcgccaacctcggcacctacgtgctggacgcacaactcaacccggtgccggctggcgtcagcggcgaactctatctcggcggcgttggcctggcgcgcagttaccaccgacgcccggcgctgaccgccgaacgttttgtgcccagcccgttcgtgatgggcgagcgcctgtatcgcaccggtgaccgcgtgcgccaacgtgccgatggggtgatcgaatacctcggccgtctcgatcatcaggtcaagttgcgcggcttgcgtatcgagctgggcgaaatcgaagcacgcctgatgcagcatccacacgtgcgcgaagccgtggtactggtacatggcggcaagcagttggtcgcctatctggtgcacccaggcgaggcgccaacggacctcaaggcctggttgctcagcagcttgccggaatacatggtgccgacgcatttcattgcgctgcccaagctgccggtgaccgccaatggcaagctcgatcgcaaggcgttgccagtgccagacgcggcactgcaacaggcgtttgtcgccccccaaggcgacctgcaaacagccctggctgccatctggagcgacgtactgggcgttgaggaggtcggccaggacgataacttcttcgagctgggcggcgattcgatcatctccatccaagtagtcagccgcgcccgtcaggccggcattcgcctgagcccgcgtgacctgttccagtaccagagcatccgcagcctggccctggtggcgcgctttgagcaggtcagcctgatcgaccagggcccggtcagcggcgaggtcatgctgacgcccgtgcaacacagctttttcgaccagccgatcccggcgcggcatcactggaatcaatccttgttgctggtgcccggcgaggtgcttgagcctgcacggttggaggcagcgctggcgcggttgatccagcatcacgacgccttgcgcctgcgttttgtgcagcaggctgacggctggcagcagagccatgccgcctacgtcagcgaaccgctgttgtggcaatgccaggccagcaccgacgccgaactggcggcgctgtgtgatgaagcccagcgcagccttgaccttgcccaaggcccgctgctgcgcgccgcgttggtgaatttggccgatggcagccaacgtgtgctgctggtgatccaccacctggtggtggatggcgtgtcctggcgcatcctgcttgaagacctgcaacaggcctaccgcgaccaggcgctgccggcgaaaaccagtgcctaccagcgctgggcgcaacagttgcaccgccacgcgcagtccctcgaccagcaactgccgtactggcaagcccaatccatcgacgccgagctgccgtgtgatcaccccgaaggcggcctgcaaaaccgcctgggtgccaagctggaaacacgcctcgacgtcgagcacacccgccgactgctgcaagacgcgccagcggcctatcgcacccaggtcaacgacctgctgttgaccgccctggcgcgggtgatcagccgttggagcgagcaacctgctgcgctcattcaattggaaggtcatggtcgggaagacctgtttgacgacatcgacctgagccgcaccgtcggctggttcaccagcctgtacccggtgcgcctgcacgccgaaggggaactgtcggcggcgatcaagtcggtgaaggagcaactgcgcgccgtgccgaacaaaggcattggctacggcctgttgcgttacctcggcacgcctgacacccgcgaagcgttgtcgaccctggccgcgccgcgcatcacgttcaactacctgggccagttcgaccgccagttcaatgactcggcactgttcgtgccggcccgccagggcagtgggcaggctcaggatgcagaggcaccgctggccaactggttgacggtggaagggcaggtgtatggcggtgagctgtcgcttcaatggggcttcagtcgagagatgttcgaggcggcaactgtgcagcgtctggcggatgagtacgcagccgaactcaatgcgctgatcgagcattgctgtgccacgccggcaggccaggtgagcccgtcggatttcccgctggcacgcctcacccagcagcaactggatgcgttgcccgtggccgggccggcgattgccgacctttatccgctgtcgccgatgcagcaaggcatgctgttccacaccctgttggaacccgaggcccaggcctacatcaaccagttgcgcctcgacatcgagggcctcgatgtgctcgctttcgggcgtgcctggcaggctgcactggatcgccatgacatcctgcgcagcagcttccattggctgggcctggacagtgctcatcagctgatccagcgccaggtcgacctgcaactgcaagtgatcgaagacccaaacgccgacttcgacaccctggcccacgccgaacgcgaacgtggttttgccctgaatgccgcgccgctgtttcgcctgacgctggtgcgtggtgccggtgcggcctggcactttatcttcaccagccaccacatcctcatggacggctggagtaacgcgcagttgctcgccgaggtcatcgcgcattatgcggggcaggcagtaccggcgccgctcgggcagttccgcgattacctcgcctggctgcaacaacagtcctcgggcgaggcgttctggaaaaccgccctggcggcattgccggcgccgactctgctggcgcaagcgctgcgcacgccggtcgacggggtgggcatggctgaccatcacgtggcactggagagcaactttacccgccgcctcggcgagttcgcacgccagcacaaagtcaccctcaataccctgttgcaaggggcttggagcctgttgctgcaacgctacaccggccaggactgcgtcgccttcggtgccacggtggccgggcgttccgcgccgctgccggggatcgagcagcaactgggcctgttcatcaacacgttgccgatcatcagcgcagcctcgccagcccagtcggctgcgacttggctcagcgaactgcaagtgctcaacctcagcctgcgcgaccatgaacatgtgccgctctacgacatccagggctgggccggccagcaaggcgcgctgttcgacaccttgctggtgttcgagaacttcccggtcgccgaggcgctcaagcaaggcgcgccggccggcctgaccttcggtcgcctgcacaaccatgagcgcacgcactatccattaaccctgggcatcgaactgggcgccagcctgcgcctggagttcagctatgaccgtgcccagttcagcgaggcgcaagtggcgcagttgagcgccaacctgcaacacgtgctggcgcaattgctcgcagacgctcacatgccgctgggcaacctgcgccttctcgacgcccctgcgcaacagcagatgctcgcgctgagccgctcagccgcagcgccacaggccaacgagcgcgtgcatcagcgtatagccgcccaggccgaggcgacgccggacgccctggctgtgcaggccggtgacgccagcgtgagctacgcccagttgaaccagcgcgccaaccgcctggcccatcgcctgttggcgctgggtgtcggccccggccaacgggtgggcctggcttcgcggcgtggcccgcagttgatcgtcagcctgctggcagtgctcaaaagcggggcggcctacgtaccgctggaccctaaatacccggcggagcgtttggcctacatgctcgccgacagccgcctggacctgctgctcagcgaaaccggcttgctcgccgacttgcctttgccccgcggcctgacccgcgtggatttcagcgcctttggcgaggagctcaccggctacccgacgaccaatccgcctaatcacgcagcggcggctgacctggcctacgtgatctacacctctggctccaccggccagcccaagggtgtggccatcgaccatgccgccctcggccagttctgcgacagcgccacgctgtacagccgactgagcgccgaggaccgcgtgttgcagtttgcgaccttcagtttcgatggttttgtcgaacagtgcttcccgcccctgtgtgcgggtgcggcgttgatcatgcgtggcgatgaactctgggacgccgggcaactggcgcgagaaatcgttgagcagggcgtgactctggccgatttgcccgccgcctactggtacctgttggcgcaggaatgcgccgagcaccgtcgctccctgggcaagctgcgccaggtgcatgtgggtggtgaagccatgtcagtggaaggcgtgcgtgcgtggtacgccgcgggcttgggcaatgtgcgcctggtcaacacctacgggcccaccgaagccacggttgtgtccagtgtgcatgagtgccaattggccgatgccaacgacgcctacggcgtgccaatcgggcaggcgattgccgggcgcgcgctgtatgtactcgacaacggtttcgaactgttggccaccgatggcgtgggcgagctgtgcattggcgccgaggttggcttggcgcaacgctacttcgaccgcccggcgctgaccgccgagcgcttcttgccggacccgttttccgccacgcccggtgcgcggctttatcgcagtggcgacctggcccggtacaacccggcgggtgcgctggagtacgtcgggcgtatcgaccatcaagtgaagattcgtggcctgcgtatcgaaatgggcgaaatcgaagccagcctgcaagccttgcccaatgtgcgcgaagccgccgtgcttgcgcagccgagcgcgaccggcgtgcagttggtggcgtacgtggtgccagccgaaggccaagcgctggcgacccaggcactggcagcgcgcttgcgccagacattgccggactacatggtgccgggccattgggtggcccttgatgccttgccgttgaaccacaacggcaagctcgaccgccgtgcactgcccacacccgacctgaaccaggctagcaccacctacgtggcgccgcagagtccattgcaaatccagttggcggcgatctggcaagcagtgttgcaggtcgagcaggttggcctggaagatcacttcttcgaacgcggcggccactctttgttggctacccaagtgatctcccgggtgcgccacgacctcaagctggaagtgccgttgcgggcgctgttcgaacagccgacgctggcagcctttgctgcggcgtgcgcaggcgtgcaggtcgatacggcgcccgtgatccaggcagttggccgtgaccagccactggcgttgtcatttgctcaggaacggcagtggtttctctggcaattggatcccaccagcgcggcctatcatgtgcccaccgctttgcacctgcgcggtgaattcgacatcgcggcgctggagcgcgccgtcgaggccctggtgcagcgccatgaaccgctgcgcaccacctttgtggagtcgggcgagcacactgtgcaagtcatccacccaagcctggcagtgccggttgaacaacaaaaggtcgacgccggcgttattgagcaggcagtcaccgaagagatccagcgcccgttcgacctgcgcaacggcccgctgatgcgcgtcaagttgctgatcgtcgcgcctgatcaccatgtgctggtcatcacccagcaccacatcatctctgacggctggtcgatgcaagtgatgatcgacgagtgggtggcgctgtaccaaggcgacgctggcttgccggccttgccgatccagtacgccgactatgcccagtggcagcgcgactggatggcggcaggggaacaacaacgccagctcgattactggtgcgctcgtctgggtcacgaacattcgctgctggacctgcccctcgaccatccgcgccccgcagtgcagagccatcgtggtgcgcgccgtaagattcatctggagcgtgcgctgctgactgaactcaaggccctggcccagcgtcaggacgtgacgctgttcatgctgttgctggcctcgttccagaccttgctgcaccgctacagcggccagtcgcaggtgcgtgtcggcgtgccggtcgccaaccgtaatcgcttcgaaaccgaacgactgctgggctttttcgtcaacacccaggtgctgcaagctgacgtgcacggacagatgccgttcgaccagttgctggcccaggtcaagctgcgtgctctggaggcgcaggcccatcaggacctgccgttcgagcagcttgtgcaagtgttgcagcccgagcgcagcctgagccataacccgctgttccaagtgatgttcaaccatcaggacagcctgcgttcagccccggtgcaattgcccggcctggctttgcagccagtggattgggccggtcacagcacgcagttcgacctgaacctggaaaccgaggaatcggtggacggtctctgggcctcgctgacttacgccacggatctgtttgacgcggcgaccgcggaacgcctggccgagcattggcaaaacctgctgcgcgcggtcctgcaggatgcctcggtggccttggacgacctggcgatgctcagcccgtcgcaatcgcagcaaatggtgcacgactggaaccgcagcgacactgactacccgcgcgaacgctgcgtacaccagttgtttgaggcccaggccgcggcgcaacccgacgccattgcgctgcacttcaatgacgagcgcctgagctacggcgaactcaaccgccgcgccaatcggctggcccatcgtctgatcgacatgggcgtcggcccggacgtgctggtggcggtgcacgtggagcgttccctggacatggtggttggcttgctcgcgaccctcaaggccggtggcgcctatgtgccgctcgacccgcaattcccggcagagcgcctggcctacatgcttgaagacagcggcgcccgggtattgctgacgcaaccgcacctgctggggcacctggctcagccgcacggcgtgcaggtgctgatggtggaggatgccggcacagcgcagcacgacccccaggttgctgtgacaccggagcatctggcctacgtgatctacacctctggctccaccggcaagcccaaaggggtgatggtgcgccacaaggcgctgtgcagcttcaccagcggcatggctggcacgttgagtatcggccaagatgcgcggctgttgtcgctgaccaccttctcgttcgacatcttcgctctggagctgtatgtgccgctgagtgtcggcggtaccgtgttgctgagcgaccaggcattggccctcgacccggaggcgatcctcgatctggcccagcgccaggcggcgaatgtgctgcaagccacgccctcgacctggcgcatgttgctcgacagcccacgggctcattcactgcgtggcatcgtctgcctgtgcggtggcgaagcgctgcccgtcgatttggcccagcgcatgctcgatctgcaaggcccgttgtggaacctctatggtccgacggaaaccaccatctggtcggcggctcatcgtttgcaccaggcattgccgttcgttggacggcccatcgccaataccggcttgttcatccttaatgccggtctcacgccatgcccccaaggtgtgtccggtgagctgctgatcggtggtgtcggcctggcgcgcggttaccacgggcagccggcgctgaccgccgaacgcttcgtgcccaacccgtttggggctccgggcgaacgcctgtaccgtaccggcgacctggcacgctatcgggccgacggcgtggtggaatacatcggccgtgtcgaccatcaggtcaaggtgcggggtttccgtatcgagctgggtgaaatcgaagcctgcctgcgtgagttcgacggcgtacgcgaagccgtggtgctggccgataacgaccgactgatcgcttacctggtcagcaccgcgccgcaggcgccgcaggagtataaagccgcgctgcgcgcgcgtctgccggactacatggtgccagcgcagtggctgttcctcgacagcctgccgctgacccccaacggtaagctcgaccgcaaggcactgcccaaaccggatgccagcctgtcgctcaaaggccatgtggcgcccgtcaccccgcgcgagcagcaggtggcggcgatctgggccgaggtactggaattaccccaggtgggcctcgacgatcatttcttcgagttgggtgggcattcattgctggccacgcgggtggtgtcacgggtgcgtcaagccctggggctggaagtcccactcaaggccttgttcgaacagccgctgctgggtgatttcgtgcgggccttgggcgaggagggcgtcaccgcgcctgcgctgatcaaggccgaccgcacgcaacctctgccgctgtcttatgcccaggagcgccaatggttcctttggcaactggacccggccggcgccgcgtatcacatccccagcgccttgcgtttgcagggtccgttggacctgaccgcgctgcaagagagcttcgatagcttgatggctcgccatgaaagcctgcgcacgtatttccgtcaggacgccaccggcgcggttcaagtcattgacgcccagagccgggtcgatatcgagcaggtcgacagcgactatgccggcctcaaggcgcgggttgcgcaggtggtcgcccagcctttcgatctgctgcgtgggccgctgctgcgggtcaccttgctgcgcctggccgaggacgaccacgtgctggtgctggtgcagcatcacatcgtctctgacggctggtcgatgcagttgatggtcgaggagttggtgcaggcgtatgccgctaacagccaaggccaagacgtgcaattgccggcgctgccgatccagtacgccgattatgccgtgtggcagcgcgattggatggaggccggagagcaggcgcgtcaattggcctactggcgtgagcaattgagcggcgagcaaccggtgctggagttgccgttcgaccacccgcgcccggcacagccaagccatcgcggcgcacgcttgggtatcgagttgcatccggagttgttgggcagtttgcgcgcgctggcgcagcacgctggcgtcacgctgccgatgctgctgctggcgtcttaccaggcattgctgcatcgctacagcggccaggaagatgtgcgcgtgggcgtgccgattgccaaccgtaatcgcctggaaaccgaggggttgatcggcttcttcgtcaacacccaagtgctcaaggccgatatccacgggcaaatgagcaccgagcaattgctgcaccaggtgcgtcagcgttccctcgaggcccaggctcaccaggacctgccgttcgaacagcttgtgcaggcattgcaaccggagcgcagcctgagcctgagcccgttgttccaagtgttgttcaaccaccgtgtgagcgctgccgacagccacctgcatcgcctggccgacctgcacgtcgaagtcctggatttggacgagggcgtggcccagttcgacctggcgctggatgtggaagaaagcccgacggccctgcgtgcctccctgagttatgccaccgacctgttcgccgtggcgaccatcgagcgcatggccgggcattggcagaacctgttgcgggcaatggtggtcgacccacagcagcccattagccaattgagcctgctgggcgaggatgagcaaccgcagattcttgaattgtggaaccagaccgacgccggtttttcagccgagcgcctggtgcacgaattggtcggtgatcgcgcccgggaaaccccggacgcggtggcggtgaaattcgatgctcaaaccctgagttacggcgagctggatcgtcaggccaaccgcctggcccatgccttggtcgcccgtggcgtcggcagggaagtgcgggtggccatcgccatgccgcgcagtgccgagagcatggtggcatttctggcggtgatgaaagccggcggtgtgtatgtgccgctggatatcgaatacccacgtgatcgcctgctgtacatgatgcaagacagccgtgcgcaactgctgctgactcacagccgggcgctgcagcaactgccagtccccgagggcctggagaccctggcgattgatcgcaccgaagagtgggccggttacagcgatacggcaccggatgtggcgctggacggcgacaaccttgcctacgtgatctatacctccggctccaccggtttgcccaagggcgtggcggtgtcacacgggccgctggtggcgcatatcatcgctaccggcgagcgctatgaaacctcaccggccgattgcgaactgcacttcatgtccttcgccttcgacggttcccacgaaggctggatgcacccgctgatcaacggcgccagcgtgttgatccgtgacgacagcctgtggctgccggaatacacctacgagcagatgcaccgccacaacgtgaccatggcggtgttcccaccggtgtacttgcaacagttggccgaacatgccgagcgcgacggcaacccgccggcggtgcgggtgtattgcttcggcggtgatgccgttgctcaagccagctatgacctggcctggcgcgcgctgaaacccaagtacctgttcaacggctatggcccgacggaaaccgtggttacaccgttgttgtggaaggcccgcaaaggcgatccctgcggcgctgtctatgcgcccatcggcaccttgctgggcaaccgcagtggctacgtgctggatgcgcaactgaatctgcaacccatcggcgtggccggcgagttgtacctgggcggcgagggcgtggcccgtggttatctagagcgtccggcgttaaccgcagaacgcttcgtgccggacccgttcggcaagcccggcagtcgcgtgtaccgaagcggcgacctgacccgcgggcgtccggatggcgtggtggattacctggggcgtgtggaccatcaagtgaagatccgcggttttcgtatcgaactgggggaaatcgaagcgcgcttgcgtgagcaagccagtgtcggtgaaaccgtggtggtcgcccaggaggggccgacaggcaaacaactggtggcctatgtcgtaccactggacccgacgctcctggatgatgttgtcgctcaatccaccggtcgcgaaaccttgcgccgtgccttgaaaacccgcttgccggactacatggtgccgacgcacttgatgttccttgagcgtatgccactgacccctaacggcaagctcgaccgcaagggcttgccgctgccggatgtaagtcagatgcagcaggcttatgtggcacctcagagcgagttggagcagaagatcgccgcgatctggtccgatgtgctacgcctgccgcaggtgggcttgcatgataatttcttcgaactgggcggcgattcgatcatttcgattcagctggtcagccgcgcccgccaggccggtgtgcgtttcacgcccaaagagttgttccagcatcagaccgtgcagagcctggcgacggtcgcgagggaaggcgacggtgtggtgcagatggaccagtcgccgctgactggcgatttgctgttgttgccggtgcaacacagtttttttgccgatgacattccccagcgtcatcactggaaccaatctgcggtgctgcaaccgcaccagccgttgcaggtaccgcttttgttggccgcactgcaggcattgatcgtgcatcatgatgccttgcgcagcacctttatcgagggcgcacagggctggagcgcggcctaccgtgggccggatcagcaccaggctgaacaggtgctatggcaaaccacattgaacagcgtcgaagaacttgaggccttgggcgaagaggcccagcgcagtctcgatctgggcgcaggcccgttattgcgtgcggtgttggcgcagttggccgacggttcacagcgcttgttgctggtgatccatcacttggtggtggacggtgtgtcgtggcgcattctgcttgaagacttgcaaagcacgtatcagcaactggcccaaggcgcacctgtgacactgccagccaagaccagcgccacccgcgcctgggctgctcgcctgcagacttacgcccacagcccggcgttgcaacaggaactggtttggtggcagacgcaattgcagggcagcccggtcggtttgccgggcgccgatccacaggcgagtctgagcaaccaactggcgctgagtgtgagcacacacctggatgccacctatactcggcgcttgctgcacgatgcgccgagtgcctatcgcacccaaatcaatgacctgctgttgactgctctggcgcgagttattacgcgctggagcggcgaggcttctatgttgatccggcttgaaggtcatggccgcgaagatctgttcgatgacatcgatctgactcgcactgtcggttggttcaccagcctttaccccgtgcaactggccccggccgattccctggctgcctccctgaagcgcatcaaggagcagttgcgagccgtgcccgacaagggcctggggttcggtgccctgcgttacctgagtaatgccgcaacgcaacaggcgttggcggccttgccgcagccacgtatcaccttcaactatctggggcagttcgatgccagcttcgacagcggcgaacagccaggactgttcacgccgaccgctgatgccagcggtgccgagcaaagcccgcaggcacctttgggcaactggctggaaatcaatggtcaggtctatggtggtgagctgaagttgaactggagtttcagccaggcgatgttcggtgaagcaaccgtcaagtgcttggccgacgactatgccttggaactcaaggctctgattgatcattgttgcgagtcggcgcatcagggcgtgacgccgtcggacttccccttggcgcggttgtcccaggaccagttggatggcttggcactgaacgtggctgaggtcgaagacctgtacccattgtcacccatgcagcaaggcatgctgttccaatcgctgtacggcgaaggttcgggtgactacatcaaccagatgcgcatnnnnnnnnnnnnnnnnnnnnnnnnnnnnnnnnnnnnnnnnaatcaccatattttgatggatggctggagtggttcgcagctgttcggcgaggtattgcaacagtatgcgggtgagccgctgccagcgccgaccgggcggtatcgtgactacatcgcttggctgcaggcgcaggacaaagccgtcagccaagcgttctggaaggcgcaactggtcaacttgcaggagcccacgcgcctggcccgcaccatagacgccgaggtggatgcggccctggcggtcaatggcgagcatcgcttgagcctcgatgtcgcgcaaaccgaacacctcaaagccttcgcccaacgtcacaaggtgaccctcaataccctggtgcaaggcgcatggttgttgctgttgcatcaccacaccgggcaagccaccgtagcattcggcgccacggtggcagggcgtccagcggaactgcgtgggattgaacagcaggtcggcttgttcattaacacgctgccggtagtggcgacgccggatgcgcaaatgtcggtcagccagtggctagagcaactccagcaacagaacgttggcttgcgtgagcatgaacacacgccactgtttgagatccagcgctgggcggggctgggtggagaagcgctgttcgacagtatcctggtgttcgagaactacccggtgtccgaggcgctggagcagggcgcaccgtcggggctgcgttttggcgcagtgcacagcctggagcagacccactatccattgaccgtgttgttggctataggccagacactgggcttggagttcaactactcccgccaggctttcagcggcgcgcatatccagcgcttggccgagcacttccagcagttgctgctggccctggccagcgacggcagtcaacgccttggcgcgttgccctcagtggcgcaggccgagcggcagtgggtattgcatgattggaatgccactgcggtggattacccgctggatcaagcggtccacacgctgatcgaggctcaggtgctgcgtacaccggatgcacttgccttgattttcgcggggcaagccttgagttacagcgcgttgaacgcccgggccaatcgcctggcacatcgcttgatggcggccggggttggcccggatgtgctggtggggctggcggcagagcgctcggtggagatggtggttggcctgttggcggtgctcaaggccggtggcgcttatgtgccgctggaccccgagtatcctcgtgatcgcctggcctacatgctgcaggacagtggtgtgcaactgctgttgacccaggctcatctactggcgcaactgccggttcctgccggtgtgcaaaccctggtgctggaacatggcgatacctggctggaaaccttcagcagccacaacccgaatatcccagtgcacggcgaaaaccttgcctatgtgatctacacctccggctccaccggtcagcccaagggcgctggcaaccgccatatagcgctgaccaaccgcctgtgctggatgcaacaggcatatgggctcaagccacacgacagcgtgttgcagaaaacgccgttcagctttgacgtgtcggtgtgggagtttttctggccgctgatgaccggcgcgcgtctggtagtggctgcaccgggcgatcatcgtgatccagccaggctggtacggctgatcaacgagcaacaggtcaccacgttgcatttcgtaccttccatgttgcaagcgttcttgcaagacgcggcggttacttcatgccagagcctgcaacgcatcgtttgcagtggggaggcgttgcctgccgatgcccagcagcaggtgttcgccaaattgccccaagccgggttgtacaacctgtatggccctactgaagccgccatcgacgtgacccactggacctgcgtggaggaaggccgcgacgccgtacccattggccgacccattgccaacctgggctgctacgtgctggacgacaacctggaacctgcgccagtgggtgtgctgggcgaactgtatttgggcggtattggcttggcgcggggttatcaccgccgtgcggcgcttaccgccgagcggtttgtgaccgacccgttcggcagcggcacgcgcctgtatcgcaccggtgacctcgcgcgttatcgcgacgatggcgtgattgaatatgccgggcgaatcgatcaccaggtcaaactgcgtggcctgcgcatagagttgggcgaaatcgaagcgcgcttgctggaactcgacaatgtccgcgaagccgcggttctggcggtggacggtacccacctggtgggttacctggtgctgcaacagccgcttgaagcgtggaaggcagaggtggttgcacacctggccgagcagttgcccgactacatggtcccggcgcaatgggtagtgctggcgcagatgccgttgagcccgaacggcaaactggaccgtaaggcgttgcccaagccagaggcccacagtgccgcgcaataccaggcacccgttagcgagattgagcagcaaatagcggcggtctggagcgaggtgctggaggtggagcgcgtagggctcaacgacaacttcttcgaactcggtggccattcgttgcgggtgctgatgctcaaggagcgaattcgcaaggtcagcggcgtgaacctatctgtcagccaattgatgctcaaccccaccgtggcggggcaggtcaaatgcctgcagggcaatagccggtcttcgttgatcgtcaagctcaaccagcagacgcaaggcacgccgttgttcctgttccacccaagcttcggctcggtgcattgctacaccgcgattgccctggccttgcgcgagcagcgcccagtgttcggggtaatgtgccgtgccttggccgaagagggcgccacggtgccgcaatggcaggtaatggtcgaggactacaccgcgcaattgttggtggcccaaccccaaggcgcgttccgcctgggtggctggtcattgggtggcaacctggcgatggaggtagcctacggcctggagcaagccggcagagaggtggagtttgtcggctggatcgacgctgcgccgccgcagtgggtcaaaccttattgggattctgtggaagttgaggacgaccgcgaagcctcagccaatgagcgccgcgccgcgttgctgggggtgatgttccctgagtttgccgagtccatccaactcgcctggcagcaatgccaacgggataccgaggatgaagcgggacaatggcaggaatttgtgaactgggctgaacaatctttgggcgaagccttcacggtgatcaaagatgaattactgcgtggcaatgaggcgcagatttcctgggacgttgaccgggcactcagtgagcgtttgctgcaagctgacttcaagcccatcaaggctcccgtcacttgttggtgggcgtccatgagccgggcagggcgcttcaaggacctgatcgaacagcaaatggcaacggtgatcagccaagggcgcatcgagcgctcagtgatgatcgagaccgatcatgacggcattatcgacagcgcggtgtttatcagcagtttggtagaggcgttgaggtaagccgccgctcaaccacaaaaacccggatccagtgtccgggtttttttatgctccaatccctcttcgccagtatctctgcacgcgcaaaaaaaagcccggtgagcatggggtgctcaccgggcgtttgatcgattgacgcgtggaatcagaagtcccagcgcgtgctgaccatcacattacgtggctcaccgtaggcggccgagttatagaagcccacgttggtgtagtaagacttgtcgaagatgttgttgaagttgacagtagccgacaggttcttggtgacctggtagcgggtcatcaagtccaccagccagtaggattcctgagtgatgtcctggtctttctggagcggctcgttccagattgaattccagcccttggtctgccagcgtacaccgccaccgatggtgaacttgtccaggtcgcccttgagtttgtaggtggtgttcaggttgacctgatgctcgggttcgaaggtggagagtttcttgtcgtcttcgtctcgtacgatcttgtgggtgtagccaccttgaagttgccagcctgggctcaactcaccggaaatttccgcttcgtagcctttggtgacggccttggagctcttgaacgcccagttgttcggggcaggtgtctggttgttgtaggcgtcatccgagatggggcgattagtctcatgcacttcgaagtaagcgatgctggtgttgaggcggccatcgaaaaactcgcccttcaggcccaactcgtagttctgcccttcgtctggctccagcagcttctcgttacggtccttataggtgctttcctggggttggaaaatatcggtgtagctggcgtataccgagaagttgtcgttgaggtcgtagatcactccggcgtaaggaatgaaccgcccggtttccttgtaggaggggttgttgccagtcacgtgatagttggccacgcgcccacccaggatcacgttcaggtcgtcaatcacgttgaaacgcgcggtcaggtaatacccggtttgacggatagtgtcgtcgatgtgctgttgggcaggaccgtagataggcttggcgatatggccgttccagttatagaaatcgaccttgttaccgccaggccattccggtgaccagtagcccttgccttgccagcgcgaggtaccgatcgagccgcccaccaccagttcatgctcgcggccaaacaggctgaaaggcccggtggcgtaaaggtcggccgaggtgctcttggtctcgccggtgtatttctgcccgttgatctcggcggtgccatcggctgccggctggacgaattgaatcgaacccaggtcggcatggtagccgttgatcttgtggtcgagctggaatttggtcacccagccgtcgcccaggtcatgctcgagcatggcaaaggcggtacgcgtgttttgctcccatgagctccaggtggtgccgttgttgtaagagcgcggcattttgttgatgctgccgttggagttgaccagcgggaaggagccggaccagctggaaccctgcggaatgttgtcctggtaatcgaagcccaccgtcagcatggtctcgggagacaggtcgaactcggtgatgccgtagtaggtttcggtcttgcgcgaatagtggtccataaaggacttcttgtcctgatacgcagccaccgcacggccgcggatattgccgctgtccgtcaaggggccactgacatccacttcgctgcggtagttgtcccaggagcccgcgcccaattgcacatggcccttgaattccgcggttggcttcttgcggatcaagttgatggtcgcacccagggaaccggcaccgttgagcaggccggtggcgcccttgaggacttcaacacggtcgtagatcgccatgtcgctcagggtgttgcccgccgaatagccgacgttacgcacagtcgacggaataccgtcgtactggaaactattgaccgaaaaaccacgggaatagtagttggtgcggtcggagtcgtaggcggaaacggtgatgcccggcgtatggcgcatcacgtcatccatgttgttgaggccaaaatcctcgatgtgctggcgagtcaccacggtgatcgactgcggagtttgccgtggggtcaacgtcagacgtgtagccgtggcaatcgtgccaggcgtgtaggaaccagaaccttcggtgacgttgcccaggtagttggcagtcacctgcgtcgggctcaactcaagcccaccaccgctgccagcagctgtgacggtcaaggtattgccattgaggttataggtggtctggctaccggccagcaatgcagctatggcctgctgcggctgcatcttgcccttgacggcggggctgttcttgccctgcacatcgcccgggctgtagagcacttgcacattggtctggcggccaaattcctgcagtgcgctccccagcgactgcgcaggaatattcaactcgatctcctgggcttgcacatagcttgcaatcggcatcgacacagccaacgccagggcactcggcaaaaggttgatgttcagggcccggcgcatggatagcgctttgctcagggggctgagaccgagtcgtgctggcatggatgctttctcttctatgttttaagtgggcaattctaagtgtttattgagtttagttctcattaccactagtgagacgttcctacttcgcaaaaccggaaaaatttttttcggtaccttatgcaggctccatctcatgcaccacttggccggcgcgcaagcgcaccagatgatcggcgatgtcgaaataacggtcgtcgtggctgatcacgatgatggtcttgcccaggcgtttgaggtccggcagcagctcggtgtagaagatgcggcgaaaggccgggtcctggtcggcggcccattcgtcgaacaccagcaccgggcgctcttccagccaggcattgaccagggccaggcgcttgcgttggccggtggacaggtcagtggtgctgaacacgccgtccttgacgctgaccttgtgtgcgatttccaggcgctcaaggtattgggtggcgctgtccagggactgggtggcgctgccttgtaccaggtcatcgaataggtaatagtcggaaaacaccgtggtgaacaactgacgataatcgtcgcgctctgggtcggtcaccgctgtaccgttgagcaggatctcacccgactgaggcggatacaggcccagcagcaatttgatcagcgtggtcttgccactaccattctcgccgacgacaaacacgatatcgccttgcttgatgctcaggttgatcggccccaggtggaacggttggctgccttcaaccgctggcgggctgtagctgacgccgcgcagttcaaggctgttgaccagtggtttcggcgcctcactgtcgtccatcagcaagtggggctcgggcgaagaaaaacgctccgacagttcgctgatgcgcccaaaggcaatcttcgccttgccaacgacgggcaggtaacccagcaggtgttccagcgggcctttcatatacagcagtaccagcacgaagccggtaatcaccgtggggtcggggttggggttgtaggcctgcatcgccagggccagtccgatgaccacaaagaacagcatcgagccaaaggtcttggccagaatatagatgttgactgaacgcacctggatatcgctgatgcggtctgcggtttcctggatgcgatgggtgttcatgcgaaaccgccgcggacggtgcatgcgcagttccttggctcccgaagcaatcgcattgtagtaacgctgcaattcatcttcgtggctgcgggccagatcgaagccctggatgcctttgccgcccgcgatgaattgcacggcgctgccgatgatgattgcgaccaccatcatcaggaacatcggcacggacaggtaagccaggtaacccaggcatcccagggtaacggtggcggcgatggccaggggcgtgaaggcaaaggaaaagtcgctaatggtgtccacgtcgtgggtcagcaccgggatcaggcggtgagagcgatattgctcgatctgcccgatgggcgctgacagcaccttttcacccaggtccttgcgcagggcggcaatgatccgttgtccgacgtagttggtgccgatgtcggaaataatcgagctgaccagcgccaccacgcacaacgcggcgaaggtcaataccacaccctgagtcatcccccccgccgaatgcagggcattgttaatcgtcgccaacagcaaggtaatggccaggccgcccgccatgccaagggcgacggagaccgtcacgatggtgcgaaagggcctgagcaatgcgagcaaacctttgaaggcgccgcgcttggggtcggtcataaatacttcccggaaagtgaaaaagagggggctgggcacacagacccttacccatgacaaacgaagctgtggcgtgactatttagcgcggcgtgccgggcggtggcagtgagcgataaattgcccggggcctggttcgttcttgttctgtaggcgcacgtgtatcaatgccgtgcgtggccctttgagcgagagcgaaacacatgacgaaaaagaacctggtgtatgtctggtccctgagaaatgccgccgccgacaaggcagggcagccggtggcctataaagaccacgagcgctatatgaaatcggtgctggagtttttggtgggctcgctcaacgacacgccgctgggcgaggcttacaacctggtgggcgtggtgtatgacgacgatgagcaaaacccgcgggaccagcagttggtggcggactacggcttcgcttatcagccgggtcgccagtggttgtacccggcggatttgcgtgtgcaaggcacgttggtcaacgacctgctgctcagcgtgccgtcgacctatcgtcgcctgccacggggcagcgccgaacatatcgccggcaagcaggatttcgagcgtcgcctgcatgacactctggtggagttgaaggctgacatcgtggtgctggatggtttgctggtgatcctcgacgaactggtgcgcccgggtgcgccgtttgcgcggcgcatcatgaacattcatccgggcatcacccgcctcgaatcgccttacgaacgccgtggggcgtacgccacctggaatgcgctgtacggcgcgcgtgggcaggcgatcaccgactgggcgaccaaggaggctcaggcgtgcgagccgttgtattggaccggtgcgtcattccactacgtggataacggcatcgactcgggagaggtgttccacgacgtgctcaagaccgagatttcgcccgaggacaccatccttgagctgcgctggaacaacttcaacaacagcctgttcccggcgctgcatgaaggcttggcgctgttggccaagcaaggctgaaccctgtaggagcgagcttgctcgcgaaaaacgtcaacgatgacgcgtgcttcctgaatannnnnnnnnnnnnnnnnnnnnnnnnnnnnnnnnnnnnnnnaacggtaaccacgatgcgaagcgagccgctcttgatcttgatctgcttttgatctcaagcgccccgtcaaaccacgctggccggaattcgacagggatttggggggtaaaccggcagggatgccggcggattacgggcacaccgagcctaagcgaggtgccgagtggtggggcaagagcgttttgcttactttgccgcttttgcaaagtgagccgccgtcagggcagaaccctaggtggccgttaccgcagcaatggatatgtacacaatccaactgtgttgactgccagaccgccttcgcgagcaagcccgctcccacagtaggatcgttggggtgtcaggtagatagtcgcaggctggcgggccgctatcgcaggcaagccagctcccacaggttaaagcatcgttctatatgtagaacgatcagggccatttttgccggctagtgttcaagggtgagacgatttaaggtgtactcactttggaggtacaccatgaaaaagctgattggtatctacaccagcccccgcgcccactgggtcggcgatggcttcccggtacgcacgttgttttcctacgacaccatgggcaagcacatcagcccattcctgttgctggatcacgccggccccgctgaattcacgcctaccgaacagcgccgtggcgtcggccagcacccgcatcgcggttttgaaaccgtgaccatcgtctacgacggcgaagtcgagcaccgcgattccaccggtgccggcggcaaaatcggcccgggcgatgtgcaatggatgaccgcagccaaaggtatcctgcacgaggagtttcactcccaagacttcgcccgtcgcggcggcgcactggagatggtgcaactgtgggtcaacctgccggccaaggacaaaatggcggatgccggttaccagaccatcgtcgatagcgacattccggtgctgccactggcgaacgacgccggccacctgcgcctgatcgccgggcaattttccggcactcaaggtccggcccgcaccttcacgcctatagacgtgtgggacttgcgcctcaacgccggtaaagcggtcacgctggacctgcacgccgggcgtaacaccgccttggtggtgcttagcggcacgttgttgatcaatggcgaagaagtcgcacgccaggggcaattggcgctgttcgagcgcgacggtaagcaactgaccctggagtccaacgaggacgccaaggtgctgttgctcagtggcgagccgattgacgagcccatcgtcggccacggtccgttcgtgatgaacaccgagcaggagattcaccaggcgtttgccgactttcagtcgggccagttcgggcaaatgcacgcctgacggttcaccgcaacctcctgtgggagctggcttgcctgcgatagcatcaccctggtgtagctgatacaccgcggtgtttgcatcgcaggcaagccagctcctacattttgtttccagggttctgatttcatgcgatcttctcggcattcgccctggagtcgcctggatgccctcatttatcgctgatcacccgatgctgtgcgccgtggcgttgatcctgatcgacatcgccgtgtggcgccttatttctcccaacctggccaactggaaactcgcggcacggctggtgattttcgcggtgttcagcgccgtgctgttcaacgacggcatgaaccccatgcaagcggcgccctatgccgatgacaccaccttgcacctggccgccacggcgctgcagatcggctggtggttgttcgccgcccgcaccctcacggtgttgctcggcgcagtgatgatgcagcgggtcggccataccgggcgcttgttgcaggacctgctgggcgcggtgattttcctcatcgcgatcatcgccgccatggcctacgtgctcgacctgccggtcaagggcgtgctggccacctccggcgccgtggcgatcatcgtcggcctggccttgcaaagcaccctgagcgatgtgttttccgggatcgtcctcaataccaccaagccttaccagatcgatgactggatctccatcgacggcaccgaaggccgcgtcaccgacatcgactggcgcgccacgcgcctgcaaacctcccagggcagcctggcggtgatccccaactccctggcggccaaggccaagatcatcaacttctcgcgcccggcagacatgttcggcctggcggtcagcctgcaagtcagcccccacgcgcgcccgcaaaccgtgatcgaagccctggagcgtgcgatgcagggctgccggccgttgctggcccagccggcgcccagcgtcgcgttcaaggcatccactggcagtggcgtggaatatgagatcagcggctttgtgccggccatgggcctcaagcgcgaaacccgcaaccagctttacgacctggcctaccggcatttgcaggcggcgggcgtgggcctgctgtccgccaccgaaggcagcacgccgcctgcggtgtctggcgcccgcgctttgctggagcgctcgtcgatcttctccaccttgcgccaggaagaaaaagacaccttcagccagaacatgaccctgcacacctaccgcgccggcgagatgatcctggcggcgggggaggtcagcgatcatctgttcattgtcgaatccggcgtggtctcggtgctcttgatcaaggacgggcacaagttcgaggccgggcgcatgggcccgggggaggtgatcggtgagtccggcattctctccgaccaggcggcgctggcggatttctcggccaagacctactgcacgctctaccgcatcgaaaatgaatacctcaagccgtgcctggacgcccggcatgatatcggcgaagccatgaaggcgctgctggacttccgccgccatgccgcccaggccctgaccgaagacgcgcccgtggtaccggtcaagaagggcttcatccaatggctgaggaaccgcggcctatagattggtcacctgttattcgcccggattggctatttctccaggacgccggggtgactaacctgctcaccaatcccactgtcctggagcaacaccatgcaaacccgtaccgatttctacaccgcttccccagacgccatgaaagccatgctcgccctggaagcggcagtcggcaaactctccatcgaactgccactgctggaactggtgcgcctgcgcgtctcgcagatcaatggctgcgcgttctgcctggacatgcacaccgccgatgcccgcaaaggcggcgaaaccgagcgccgcctgtacaccgtgtcggcctggcgtgaaaccccgttcttcaccccgcgcgagcgcgctgccctggcctgggccgaaagcctgaccctgctcagccagacccacgccccggatgaagacttcgacgcactggccgcccaattcagcccccaggaacaagtggacctgagcgtcgccatcgccaccatcaacagctggaaccgcctggcggtgggctttcgcaagatgcccaagtaagcccgtcagttggctttgaaatagtttcgcggcgtggtgccggtcatgcctttgaaaaaggcgatcagtgcactgtcgctggcaaagcccagttcaaaggcgcagtagcccaggctgcgcccgatggcaagcagttcgatcatgcgcatcaaacgccactgttggcgccattgctgataccccaggccggtttccttgaggaaaatccggccgatggtcttggtgctggcgccaatgtgctgttccaggtcctgcagcgtggggggcaagcggtcaagctgggccagcagcggcgccaggcgcttgtcccgtggcaacggcaacagcaagggttgcgccgccgcgtggcggatttcatccaggcacagtccgagcaaatgggcatagcgacccgcctgccaatcagtctcgaacggcgccagggccatgggttccagcactgccctgagcaaggcactcacttggatcacccgcacctgggccggcaactgctcggccagggccgcactcacatacaccgaccgataatccaccgcctgctgcatcaccgcacgatggggcaggccgccggggatccaggctgcgcgggtgggtggcaacaggcacagttgattgtccagggtgatgcgcgtgcaaccttgctgggtgaacagcagttgcccgcgctggtgcacatgcaggcccgaatcgtgattgcccagcaccgccgcgatgccgatcacgggcgctgcgaaggcatcggggttgaaagacgcggtagcggcaagccaggccatgggttgtccgatttgatggataaagtgtcgaagtccggataatagcccagctggcgcgccctagaatccgtccgttgtgtttatggatggatcgtgtgatgacatataaaaatttgctgccgctgaccatggccctgctgatgttcccgcagttggcccaaaccctgtacagcccggccctgggcgatatcagccgcgcctttgacgtcgcgccggaacgggcagggcagaccttgtcggtgtatttcctcgccttcgccctgggcgtggtggtgtggggccggctgagtgatcgtctggggcggcggccggtgatgctgatggggctggcaatctatgtgggcgcttcggcgctggccttgacggtgacgacattcgacgccttgctgctggcccaggcctgtgctgcttttggcgcggcggtggggtcggtggtcacgcagacggtgttgcgtgaccgtttccacggtgccgacctggcccaggtgttttccgtgatgggtattgcgctggccgccagtcctgctatcggcctgttcagcggcgcgagcctggtggaatttttcggttaccgcggcgtgctctgcacgttgctgctgctcgcggcggtgttatggggctggtgttggtgggccttaccggaaacccgtccggcctccttgcccaccgccgcccttggccagacgctcggcctgatgctcaaggatgccggagtatggcgctcggtcgggttggtcgcggcgttcaatatcgcgctgttcagctattacagcgtggggccgtttgtcttcgcgcagcaggggcgttccaccgccgagttcggttacagcggtgtgttgctggcgctgggttccgggttgggggcgtggctgaacaaagccttgctcaagcgtgggttgagcggtgagcggttggtggttgtcgccgcagcggtggccgtggtggggagcctgttggtgttggccctgcagcacagctggctgttggtgtggccgatgctgttggtggtgctggccttcggcatggcgattcccaacgtgctgggggcggccctggtcgattaccgtgaccgccttggcaccgccgccgccctgtttggcttgctgtactacctggtgattggcggcgggctggccttggtgacctggtcccaggatttaggctggagcctgttggtgtgcggtttggcagcgttgtggctggctacgtcgcggctactcagaagttgaccgacgcactcaaacgcgccgtcaacggcgcgccctggaacaggtagtcatcgcccatgtactcgcccgcgtcgcgccagtagcgcttgtcgaacaggttatcgacgctcaggcgaaacacggtctcgtagccatcgaccttggtggtgtagcggctaccgacgttgaccaccgcgtagtcgcccacttccacgttgccggtgcgattggcggacttcttggcgctgtattgcacgccgcccaatacggccaggccattgacccagggcagggcgtagtcggcgtacacactggcgcgcagctttggcacgttgatcgcctgatggccttcgtactccggcgtgccgctgccgctcacccgcgctcggatcgcggccacgctggtggcgatctgcagacggtcggtggcccagccgttggcagacaattcaatcccggtgtttttctgctggccctgttgcacgtagttgaacgtgccaccttcgggcttggcgtattggtaagcctggcgcgtctggaacacggcggcggcgaagctgatacggcgccagtcgtatttcaccccggcttcgagctggcgcgagacggtgggagcgagtgtttcatcggcattgtttgcgaaccacggcgcggtgccgcccagggacaggcccttgctgtagctggtgtacagcgaaacgttgtccaccggcttgtagatcaacgaggcctggggcaggaacacgtactgttgggtgtggcgtgtctggttgccggtgacgctgtcgaaggctttttcgtccaggcgcacttcacggccgccgaggatggtttgccattgctcgttgaagcggatgcggtcggtgacgaacaggccgtactggcggctgtcgaggttgcggtgactgtcgttcagcggcttgtcggtcgggggaaagctcggcacttcttggtcgatattggcggtgccgatgaattcgttgaccgacttgcgtttgtcgatcacccggcgaaacgcgctggtgccgaaggtcagttcatggccaatgccggcggtgtcgaacaggcctgtcatggccgcctggatttcatcgtcgcggcgggtatcgtccgggctgcggtagtcgtagacgtcgtaattgccttcggggctgaagtagttcggcacgcttgtagaactgcaactgtctgaaccatagcaaccccaggcaaacgaactgtagtcatcaatcaccaccttgctacgcgccgcgctgacactgcctttccactggtcgctgaaacggtactcgaacttgccgttgaggttcagcgaatcaatccccacctgcttgccgcccgtctggtgccccaacagcttcttcggtgaagcgccgtggggcacttcgctgccgcccagcagttgataacccggtactgagcgctgttgtttgttctggtattcggcatccagttgcaacacggcgtcggggctgatgttccagtcaaaggccagggacacgaaatcgcgctggccgttggcgtgttccacataggaattgaggtcttcatgggcgacattggcgcgcaggccgaactgctgctcgctgccaaaccagccgccaacatcggtggcgatgtaaccgctgccacgatcatcggtggacaccgtcaccgagcgcacatcctgggggcgtttggtcacgtagttgatcaccccgctgggctcggaaatgccgctctgcaaaccggccaggcccttgagcacttccacctgctgcttgttttccagggcgacgttctgctcgccggtgatggtgcgcccattgatcttgtaactgctggccgcgttcagcgaaaagccacgcaccacgaaattctcgtaataaccgataggcgcataactgtcgcccactgaggcatcgttgcgcagcacttcactgagcaagcgtgcctgctggtccttgatcagcgcggcgttgatcacggtgatcgaggcgggggtgtccaacagcggcgcttcatcaaagccgcccaccgacgcggtttcactgcggtagcccgactcatcctggccctgaacctttaccgtcggcaactcgatctcggcggccaggctgctgccgatgccgccactgagcaacaggccgagggcgaaacgtgaagtgacgacggggcgaaaacgcaaaaccatggggcaaggccttaaagcgctgggcggggggcgcctaagctaggcataagcgcggccttttacaagctttcgcgcaaggttcgcacggcgagacaacccgtctcagctccgatgccgatcctgttgcggctcgacagccaggcgccggcttgcgatagacaaggctcccctcatcgtttcaggagattgtcatgggtatcgcaggtaaagtcgcgctggtcaccggcgccgggcagggcataggccgggctattgccatgcgccttgcacaggacggcgccgatgtcgcgttggtggacattgacggcgccaagctcaacgccgtggccgccgaaatcgtcgccaccggccgcaaagcctctgtgttcatcgctgatgtatccagacgcgaacaggtgacggctgcggtagagcatgcccaccagacgctgggcggattcgacatcatcgtcaataacgccggagtggcgcagatcgactcattgctcgatgtcagcccgcagcaggtcgagcgcaccctggatatcaacgtcaagggcgtgctgtgggggatccaggcggccgccaacaaattcaaggcgctcaagcacaagggcaaaatcatcaatgcttgttcaatcgcagggcatgaaggctttgcgctgttaggggtctactcggcgagcaaattcgcggtgcgcgccttgacccaggcggcggccaaggaactggcgagcgcggggatcacggtaaacgcctattgccccggtgtggtgggcaccgatatgtgggttgagatcgacaagcgcatggccgagattaccggggcgcaggtgggggcaacctacaagcagtacgtggatgggattgccttgggccgtgcgcaaacgccggaggatgtggcggggtttgtggcatttctggcaggcccggacgcagactatatgaccgggcaggcgccgttgatcgacggtggcctggtctaccgctgacagcgtggtcgactcgcctgcgtgggagtcgatcccttgtatcagtgggttttgccgggcatatcaatacccagttggttcacgcgtcggtacagggttgcccttgaaatccccagggcctgtgccgcaggcgagggtttccagcgatggcgaatcaacgcatccagaaccatttgacgctcggggctggcgctttgctcttccagcccttgaggctgctcgccccggatttcaatcggcaaatccaccacttgcagcgtagtgccttcgcacaccgcacaggcgtacgccagcacatgccgcagttgccgcacattgcccggccacgcataacccagtagcaattgcagtgtggcctggccgatgcccaacgacacgccactgttacgcgcctcttgctccaacagccgattgatcagggccagcttatcggtgcgttcgcgcaacggcggcaggcagaagcgcgcacaacccaggcgaaagtacaggtcttcacggaatcggcccgcgctgaccagcgccgccaaatcgcggtggctggcgcagatcacctgaatgttcaccacgcgggttttcgctgcgcccaacggcgcgacttcaccctcggccagcacccgcagcaaccgtgtctgcaacgccaacggcatatcgccgatttcgtcgaggaacaacgtaccgccttcggcttgcagtagcagcccgctcatgcctttgctggaggctccggtgaaggcgccgggcgaatagccgaacagctcgctttcaatcaggctctccggaatcgccgcgcagttcaccgccacaaacggcccgtgccggcgcgcgctgtgctcgtgcaactggcgggcgaagacttctttgccgacgccggtttcaccttgcaccagcacgggcaggttgcggtccttgacccgcgcagccaagcgcaggtgctcctggatccgcgggtcgacttgagtctctggcagcgcccgaaccgaggggcgtcggggtgcattgaccctcacgtgtaccgcgtcgggcttgcccagccagtgcaactgccgggttgactgatcagtggctgcacgcaatgcatccacatcgaacacttcgccgatatgctcaggcagctggccaaagcgcaagcgcagggcttgacgcgccttgctgttcaaggcgtgcagacgtccgtcctggtcccaggccagcagcaggtcgggttggctgtcgacaaagcctggagtgctatgggcttgtaacacccagtgctgccgggcgctgtgcatgaaaaaagcgttttcgatggcctgggcgctctgcgccaccatctgccttatcaggtgctggctgccgcggtcatccggcgacttgagcgccgagacatccagcacacccaacaggtggccctgcgggtcgaagatgggcgcagccgaacacgtcaggccgataaacgctgcgcgaaagtgatcacgcttgtgcaccgttaccgccgttttactggtcagcaccgtggccacgccgcaggtgccttcctcggcttccgaccagcaggtgcccaggtaaaggccggccttgcggcagtcggtgcgaatgctcgcatcgacacggtgatcgatggtctggccctgggcgtcggtgagcatcacgcagtagtcggcatggcgcacgcgatggtgcaactgtgcgacttcttcgccggcgatgcgcatgaacagctcggcgcgctcgcggcattccttgagcaagggttcgctgaggatacgtggaccttgcagggagccggggtccaggcggtgttgctccatggaccgccgccacgaatcgaagatcagcgacggcacgggcgcctggggcaggcgctcggcattgcggaccacgcggctgacacagtcgacatgctccctggagttcatggcgagcataaagcctccggttctcaagctttgttgttatgcgcgtcattaagcgcgcatgtgtgcccacggacaagggcaccctgaccaacgcctgcattgagacgctgcgtctcatgccgctgagactcaagggtcgaactgcgtggttgcgtctcacatttagtcgaccacttgcctgggcatcgctgtgttgcacggctctggatcaaggctttgccaggttttctcgacggttggcacaagctgtgctgaacagcttggcactggccgcagccagttttttgtgcgtcgagaaaacctggagaacaacaagatgtccacccacctgtgcaccgatcagttactgcatgcctacaccgtgatgcgcaccatccgcgatttcgaagaacgcctgcatgtggagttcgccaccggcgagatccccggtttcgttcacctgtatgccggtcaggaagcctgcgccgctggcgtcatggcgcacctcaatgacgatgattgcatcgcgtccaaccaccgcggccacggacactgcatcgccaagggcgtcgacgtgttcggcatgatggccgaaatctatggcaagaaaaccggcgtgtgcggcggcaagggcggctccatgcacatcgccgaccaagagaaaggcatgctcggcgccaacggcattgtcggtgccggcgcaccgttggccgcgggggcggcgctggctgccaagctcaaggggagccagggcgtggcagtggcattttttggcgacggtggctccaacgaaggtgccgtgttcgaagcgatgaacctggcgtcggtcatgcagctgccgtgtctgtttgtcgccgaaaacaacggttatgccgaggccactggcgccggttggtcggtggcctgcaaagacatcgctgagcgcgccgccgggtttggtatgccgggggtgatcgtcgacggcaatgattttttcgcggtgcatgaagcactcggcgttgctgtggagcgggcgcgccaaggcgacgggccaacgctggtcgaggtcaagctcagccgtttctatgggcacttcgagggcgatgcgcaaacctatcgcggcgctgacgaagtgaaaaacctgcgtgaaaacgccgattgcctggccttgttccgtcagcgctgccatgccgaaggctggctggatgcagcgcagttcgagcgcatcgacggtgaagtggcgcaattgatcgaagacgccgtacgcctggccaaaaccgatcccaagccccaggccgccgacctgcaaagcgacgtttacgtggcctaccgctgataccaaccctataaaaacaagacgtggagagaatctaatggctcgtaaaatcagctatcagcaggcgatcaatgaggccttggctcaagagatgggccgtgaccagagcgtattcatcatcggtcaggatgtggccggtggcaccggttcccccggtgagcaggacgcatggggcggcgtgctcggcgtgaccaagggcttgcacccgcaatttcccgggcgcgtgctggacgcaccgttgtctgaggtcggctacgtgggcatggcggtgggcgccgctacccgtggcatgcgcccagtgtgcgaattgatgttcgtcgacttcatcggctgctgcctggaccagttgctcaaccaggctgccaagttccgctatatgttcggtggcaaaaccactacaccgctggtgatccgtgccatgtacggcgccggtttgcgggcggctgcccagcattcgcaaatgctcacctccatgtggacgcatatccccggcctcaaggtggtatgcccggccacgccctacgacgccaagggcatgttgatccaggcaatccgcgacaatgacccggtgattttccttgagcacaaaatgctctacggcatgcagggcgacgtaccgcaagagctgtacacggtcccgtttggcgaagccaactttgtgcgtgagggcaaggatgtgacgctggtgacctacggccgcatgctgcatatcgccctggaggctgcggccaacctggcgcgtcaaggcattgattgtgaagtgctggacctgcgcaccaccagcccgctggatgaagacagcatccttgaaagcgtcgagaaaaccgggcgcctggtggtgatcgacgaatccaacccacgctgctcggtcgccaccgacatcagtgccctggtggcccagcgggggttcgctttcctgcgcgctcccatcgagatggtcaccgcgccgcacaccccggtgccgttttccgatgcactggaagacctgtacatccccaacgccgcgaagatcgaggccgccgtgatgaagatcgccgacaagaggaccgccgcatgattcataccctgaccatgcccaaatggggcctgtcgatgaccgagggccgcatcgatgtctggctcaaacaacccggcgaccgagtggaaaagggcgaggaagtgctggacgtggagaccgacaagatctccagcagtgtcgaggcgccttttagcggcgtgctgcgtcgggtactggcgctcagtgatgaaaccctgccggtgggcgctctactgggaattgtggtggagggcgaggcgacagaggctcagatcgatagcgtgatcgaaagcttcaacgccgggttcgtctccagtgccgccgaagccaaagaggccggccccagcgcacaaaaagtcgaggtaggcgggcgcttgctgcgttatctggacatgggcgagggcggcacgccgctggtgttggtgcacggcttcgggggcgatctgaacaactggctgttcaatcaaccggccctggccgccgaacgccgggtgattgccctggacctgccggggcacggggagtcgggcaagtctctgcaaacgggagacgctgccgaactcagtcatgccgtactggcattgctcgaccacctggcgctcgaccgtgtgcatttggccggccactccatgggtgggctggtgaccctcaccgtcgccagcctggcgcctgcacgtatcgcctccatcaccttgatcgccagcgccggtctgggtgccgatatcaacggcgattacctgcgaggttttgtcgaagccaacaaccgtaacgcgctcaagccgccattgactcaactgttcagtaaccctgcgttggtgacgcggcagatgctggaggacatgctcaaattcaagcgcctggaaggggtggatcaagcgttgcgccagctcgatcacaagctgttcgatggcgggcggcagatgctggatcttcgcagcgaggtgggccgccagccgagcctggtgatctggggcagtgacgatgcgatcatcccggcaagtcacgcccaagggctgcaggctcaggtgcatgtattgccggggcaggggcatatggtgcagctggaggcggcggagcaggtcaatcaactgatctccacttttttgaacgcgcagccctgattgaggttcaagggagggacggtttggtctgtccctcccacaaggtcaagcgtgttttttcagctggagcgtttcagggtttcgctgggcagctcctgaaaaagcgcccggtagctgtttgaaaaccgccccaaatgccagaacgaccaattcatcgcgacctcggccaccgtggtgtcggtcgtgctcagcaactcccgccgcgccccgttcaagcggcgcaaccgcaaccactgcgccgggcttatccccgtgtaggtcttgaacccttgctgcaattggcgcaacggcacacccgcaatctgcgccagttccaacaggttggcggtttcatccggtgcatccgccgcccattcgccgatgcgcgccatcaagcggcgttcttcgctgcgcttttgtagcgaactgcggtccagacacacgcaggcgttatcgaggataaacaggcagtcgtcgagcagttgctgggtgagggcatcgcggctgatggggtcggtcagtgccgacaggcgcgtaagggtgccgctcagccagcgagtgaacagcgcattttgccgacaggtcagcggcgccatgaacaagccttcgagtttggctatatccaggccctggcgctggacgaactgtgggccgaataccaccgccacttcgcggtagttgatcggggtgatccaggtgttgcggctttcgccattgagcaggtacagcgcgttgtcactggcgtcgaaacagaacgtcagggcgccggtgggggcgttgaaatgctgctccacgcgggtgttcatgcactcttcgtaaacctgcacgccttgcaggtcgaggtagcgcacctgcccggcaaaatgccccggcgacatctgctggtactgctgcacccagccgggtgtcgcactgcattgggcggccacatcgccggtggcgaaggcctgtacgcgcaaagcggttgcctgtgtcatgggtgatccgtgcgcactctattggtgcgttgtgccgcgtgcaaagtggatagatgccgtttcaaggctggcccaagatagacctcaatgcgctgggagtacaagccggcgtcgcatcccacccaagacgaggtccttatgaacgcccccttcgatcagctgtccacctggctgaaagaacacaagattaccgaggtcgaatgcgtgatcagtgacttgactggcatcgcacgcggcaagatcgcacccaccaacaagttcctgcatgagcgaggcatgcgcctgccggaaagtgtgcttctgcaaacggtaaccggggactttgtcgacgacgatatctactacgacctgctggacccagccgatatcgacatgatctgccgcccggcagccaacgccacttacgtggtgccgtgggccatcgaacccaccgccatcgtgatccacgacaccttcgacaagcagggcaaccccatcgagctgtcgccgcgcaatgtgttgaagaaagtcctgcagctctacaccgaccaaggctggcagccgattgtcgcgccggagatggagttctacctgacccagcgctgcgaagatccggacctgcccttgaaaaccccgattggccgttccggccgtgccgaaaccgggcgccagtcgttctctatcgatgcggccaacgaattcgacccgctgttcgaagatgtctatgactggtgcgaagcccagggcctggacctcgatacgttgatccacgaagacggcccggcgcagatggaaatcaacttccgccacggcgacgccctggacctggccgaccagatcacggtattcaagcgcaccttgcgcgaggccgccctcaagcacaacgtcgccgccaccttcatggccaagccggtggccgatgagccgggcagcgccatgcatttgcaccagagcgtggtggagattgccaccggcaaaccggtgttcgtggatgccgatggcgccatgagcccgctgtttttgcatcacatcggcggcttgcagaagtacatccccatgctgttgccgatgtttgcgcccaatgtgaactcgttccgccgcttcctgccggacacctcggcgccggtcaacgtcgaatggggcgaagagaaccgcaccgtcggcttgcgcgtgcccacttccagcccggaggcgatgcgcgtggaaaaccgcctgccgggggccgatgccaacccgtacctggccattgccgcgagcctgctgtgtggttatctggggatgatcgagcacatcgaacccagtgccccggtggaaggccgcgcctatgagcgccgcaacctgcgcctgccgttcaccctcgaagatgcactggcgcgcatggaggattgcgacacggtcaagcagtacctgggcgagaaattcgtgcgcggctacgtggcggtcaaacgcgccgagcatgaaaacttcaagcgggtgatcagttcctgggagcgtgagttcctgctgttgagcgtctaaaaacaagcaaaaaaggggtgacgatatgcgtcttgtgaacaaacttctcccactggccctggccgcggcgttcagcagtgcaggccaggcggcaccgtcggtgagtgtctacaactggaccgattacattggcgagaccaccttggcggacttccaggccaagaccggtatcaaggtggtctacgatgtgttcgactccaacgaaaccctggagggcaagttgctggccgggcgcaccgggtatgacgtggtggtgccgtccaaccacttcctggcgcgccaggtgaaggccggcgcgttcctcaagctcgaccgcgcgcagttgcccaacttcaagaatctggaccccaagttgctgaagttgctggaacagaacgaccccggtaatacgcactcggtgccgtacctgtggggcaccaatggcattggctataacgtcgacaaggtcaagcaagtgctgggtatcgaccgtatcgattcgtgggcggtgctattcgagccagaaaatatcaagaagctgcatgaatgcggcgtggccttcctcgattcggcggatgagttgttcccggcgatcctcaactacatgggcaaggacccacgcagcgagaatgccgaggactacaagcaggccgaagccaagctgctgacgttgcggccgtacatcacctatttccactcatccaagtacatctcggacctggccaacggcaatatctgtgtggccttcggttattccggcgatgtgttccaggccgccaaccgcgccaaggaagccaagaacggggtgaacattgcgtattcgatccccaaggaaggcgccaacctgtggttcgacctgctggcggttccggccgacgcgagcaaccctaaagaagcccatgcgttcatcaactacctgctggagcccgaggtgattgccaaggtcagcgcctcggtgggctatgccaacgccaacccggcagccaagccgttcatggcccccgaactggtgaacaaccctgaggtgtacccgccccaggaggtactcgacaaactctatatttccaccacgcccacgccggcgaccatgcgcgtgatgacccgcgcctggagcaaagtgaagtccaaccgatgatgcagcccaatgaacatgccccgtcctattaccgcgcttcggcgaatgccatggcgcagcggcccgcacttgaggcagacctgagcgctgatgtgtgtgtgatcggtggcggttttaccggggtcaacaccgccattgaactggcccagcgcgggctttcggtgatcctgctggaggcgcgccgcatcggttggggcgccagcgggcgcaacggcgggcaattaattcggggtattggtcatgatgtctccgggtttgccaaatacgtgggcgaggagggcgtgcgctatatggagcgggccggtatcgactcggtcgccctggtgggccagcgcattgccgagcacggcatcgactgtgacctgcgctggggtttttgcgaactggctaacaccccggcgcagtttgccgcgttcaagggcgaacaggcgcacctggcggccatggggtatgcgcatgaaacgcgactggtcggcccacaagacatgtcgcaggtggtgggctcgacggtatatgccggcggcttagtcgacatgggctccggccatcttcacccgctcaacctggtattgggcgaagcgcaggcggccgaggcccttggcgtgcgtatctttgagcacagcccggtgctggagctgatccatggcgagacggtgcaagtgcgctgcgcaggcggcagcgtgcgcgcagccaacctggtgctggcatgcaatgctcatcttgaagagctggagccgcgcttgagcggcaaggtactgccggcgggcagctacatcatcgccaccgagccactgcctgagcctttggcccagcagttgatcccacagaacctggcgctgtgcgaccagaaagtcggcctggattactaccggttgactgccgaccggcgcctgttgttcggcggtgcctgccactactcggggcgcgacccccaggacatcgccgcgtacatgcgcccgaaaatgctcaaggtgttcccacagttggccagcacggctatcgagttccagtggggcggcaagatcggcatcaccgccaaccgctttccccaggtcgggcggctcaagcagtacccgaacgtgttctatgcccaaggctattccggccacggcttgaacgtgacgcactggtgcgcacggttgctggctgaagggatacatgcgggcgcaagccagggcctggatatcttcagccaggtgccacacatgacctttcccggtggcaaggcgttgcgctcgccactgctggcgttggggatgttgtggtatcgcttgcgcgaagcgctctgattgatcgttcccacgctctgccgccccccgccgccgcggacgctccgcgtcccgccgtttagtgacgcggagcgtcatgggatgcattcccacgcggagcgtgggaacgatcagcgatcagtcggtcagcactttgcgaaaggtttccaccaacggcctcaagttgacgcgatgccaggccgcccacagtggtgtggtgtaggccagccacggcagctcgcgcaacaccacgccgggcggtgcgttgcggctcaggcctttttgcaccatcgccacccccagcccggacgccaccaggcccaatgcggtaaagggttcgctggcctccatggggatctgcggggtgaaaccggcgcggatacaggcggcgacgaaatcgtcagccgggtgggcgccaggtttgcgctgcacgccgatccattgttggtcggccaggtgttcgggcaacagttcgcgttgtcgagccagcggatgctgttcgggcagggccagcagcatcgggtcgtcgaggacttgccaggcggtcaggtccgggtcatcggcggcgggtggttcgctcaccagggcgatgtccaggctgcgttggcgcaaaccttccaattgttccaaggagggcaggttatacagcttgatatgcacggcgggccggtcgtcgcgcagtatgcgcaaggcgttgggcaagacaccggcatgcatggcgttctcgatataaccgatgcacaaaccgccttcttccccacggcccaggcgcttgcccagtgactccaggcggttggcgtgggtcagcaatgccttggtttcggccaggaaggtctggccatcgcgggtcaagcggatacgctgctggctgcgttcgaacagggtcaggcccaggcgttcctcgagctgggcgatctgccggctcagaggcgattgagaaatgtgcaggcgctcggcggcgcggccgacgtgttcttcttcagccaccacttcgaagtagcgcaactgccgtagatcaatcatgtaagacctgcaaggactcaagtaggtcgcagtatgtcttggacggtctgatcagcgcaatctagcatctgctcaacggtcacagcgacctcgcaccgattgaggaaccaccatgagcttgaaagacacactgcccggcgcactgggctttggcaccgcccccttgggtaatatgtttcgcgcgatccccgaagaagaagcccaggccaccgtcgaggccgcctggagccagggcgtgcgttacttcgataccgcgccgttctacggctcgggcctgtcggaaatgcgcttgggccaggcgctgtccaactatcaccgcgatgactacgtgctcagcaccaaggtcggccgggtgattctcgatgaagtcgaagaaaccgcccgtgaccttggcgaaaaaagcggcgtattcgaacacggccgccgcaataaaatactcaatgactacagcgccgacgccaccctgcgctccattgaagacagcctgacacgcctacaaaccgatcgcctggacatcgtgtgggttcacgacatcgcccaggatttttacggcgaccaatggctggaatacttcaaccaggcccgcactggcgccttcaaagtactcacccgtttgcgcgagcaaggtgtgatcaaggcatgggggctgggcgtcaaccgtgtcgaaccctgcgagttgaccctggacctgatcgaagcccagcctgacggttttctgctggcggggcgctacacgctgctggaccacgaccgcgccttgcagcgcctgatggacgccgcccacgcccagcaggtcgagatcgtcgtcggtggcccgtacagctccggcatcctcgctggcggtgcgcattttgaataccagcaagccagcccagcgatcattgccaaggtcgagcagatcaaggtgattgcccaagcgtttggcgtcagcatcaaggccgctgcgctacagttttcactggcgcatccggcagtggcggcggtgattcccggtgccagtcgtccggggcggattgccgaagacgttgcggcgttgtctgaacagattccagcagccttctggcaagcgttgcgcgaggcccgcttgatctcggaccgtgcgcctttgcctctctcacgttaaggagcttgagcatgaaaattgatgtaagcggcaaagtggctattgtcagcggcagcaccgccggtatcggcctgggcatcagccaggccctggcgcaatcgggtgccacggtggtggtgatcgggcgtgatgcaggcaaggtggacgacgccttggccagcattcgccaggcggttcccgctgctcaactgcgtggtgtggtggccgacctcgggaccgttgaaggcgcacagaaactcttcgccgccgaaccccgcgccgacattctggtcaacaacctgggcatcttcgacgcggtggatttcttcgacgcgccggacagtgagtgggcgcgcttctatgaggtcaatgtgatctccggcgtgcgcctggcgcgccattatgtgccgggcatggtcgagcagggttggggccgggtgatcttcgtgtcgtcggagtctggcgtggcgacgccggccgacatgatcaactacggagtgaccaaaagcgccaacctggcggtgtcccacggcctggccaagcgcctggcggggaccggggtgacggtgaatgctatcttgccggggccgacctttaccgatggcctggaacacatgctcaaggacgccacggccgaatccgggcgcagtgcccgagaagaagcggatgtgtttgtgcgccacgcgcggcccacctcgatcatccagcgtgcggccaatgtggatgaagtggcgaacctggtggcgtacattgcttcaccgctgtcttcggcgacaaccggtgccgcgctgcgggtcgacggtggcgttgtcgacagcatggcaatctgatttttcctgactggagtattgatcgtggcaacagcgtcttctgtgattgaaattgcggtgccggccgaccaagtctggcaattgattggcggcttcaacagcctgcccgactggctgccttttattgccaagagcgagccgagcgagggtggccgtgtgcgtcacctgaccaccgctgacggcggcgcgattgtcgagcgtttgcagaccttcgacaacgtggcgcgcacctacagctacaccattgaagcgtcgccgtttccggtgagtgcttacctggcgaccttgcaggttgaagcgttgacagacacctcggcgaaagtcacctggtccggggtgttcacgccggcagcgggtaccaccgaggcgcaggtagaggagttgtttaccggtgtctacgaaggcgggcttgaggcgctgcgcagtaacttctaaggatggtggcgagggagcttgctccctcgtcacaaggtgggtctttagcctagatggaacaaggctgccgcgacagcctctgccggcgtcatctgcgccgtatccagcctgaacggcggcgcttcccagggttcatactcatgcacctgcaccgattgccaggtcggcggcaccagccccggaatatcgcccacacggccttcgactcgatgccgatgcgcctgctgatcggaacataccacctcgatattgatcagcgccacgccggcggctgtcgccaccgcttgccaggcatcacggctttccttcaccgggtttacacaatcggcgatcacccgctgccccaggcgcaggttactcagcgccagcgcattcgccacaccgtagccactggcccccacatcgcccgccaacacaccggcctcgcgcagcgcctgctcgatcacatcgatacgcaggtaaaccgcgcccacctgtcgcgccagctccctggcaatcgtggtcttgccactgcccggcaaaccgctgaatacaataagcatgacccatcaaccccctgtaggagcgagcaagctcgctcctacgtttagaacgtcacagtgaaggttgtgccgcgtgcctcacaggaactcactgccacatcgccgccatgcaccctggccagttcacgcacgatatacaggcccaggcccacgctgcgcacgtcgctgccctggtcggtgccgcgggtcatgggttcgaacaacccggccagcaaggcttggggtatcgccgggccgtggttgtgcactgcaacctcgcaggtgttatcgcccaggcgcgaggtaatggtgatcggctgcagcaagtcgccataggccacgctgttggccaccaggttaccgatcatctgttgcacgcggtcggcgtccaggcacgcatcgccctggccctcgccgtgatgcaccagcgtggccttggggaaggccacccgcagttcgtcgacgctgcgatgaataacgctgtgcaggtccagcggttgcggcttgatggtaatgccctggccgacccgggcctgggtgaagtccagcaggtcggcgatcatgcggtgggcgcgttcggccgactggccgatgtgccccaacagctggcgctccttggccgtgcgctcgccacgctggagaaagtcggaggccatgcggatcgcggtgagtgggtttttcaggtcatggctgacaatcgccaccatctgttcggcaaacaacgcccggcgctgagcaatggcataggcttcgctcagctcggcctgggcctgttgcagggccagttccgtagcagttttttcctgtagcagggcttcggcctgcttgcgggcattgagcagctcgcgctcgtacttgtcacggtcggtggtgccgaacaacgccaagtcatacaccacgccgtcgggctgctggcgctggttggcgttgagcaagaccgtgactttgcgcccgttgcaatggcggatgtcgagtttcacctcggtgacgctgccatgcatacgcagcatcggcgccaggtgcgtctggtaaaaaatccgcccgcccatggccagcaggtcctggaaacgccggcccagcagttgggcggcggtgaagcccagccaatcgcacaagcgcgggttgacgtgcaggatcgtgccgtcttcctgggtcaccgccagggcgcaggccgcgctgtcaaacagtgaatcagtgggcatcggcagccgcccaaggggcgaggaagcggtccatcgctgctgtgcacgcctggggggcgctcatgtgggggcaatggccgacattctcgaccaggcaataggtgctgttaggtaatacggcgtgcaggtattcacccacggccacgggagcgatcaggtcttcggtcgattgcaggatcagcaccggggtagtcaggccgaacacatcctggcggttatccgacagaaaggtcacgcgggcgaactgcttggcgatgtccggctcggtgcggcagaaactctcggtgagcgcctcgctcaggtgcggctgcgtcggcgcgcccatgatcaccggggccatggcgctggaccagcccaggtagttgctgtcgagggtgtcgagcaggtcgtcgatgtcgccatgctggaaaccgccgacatactcatcggtgtcgatatagcgcggcgatgggccaatcatcacgtgcgcggcaatgcgctgcgggatgaaacggtcggcgagggtgccgatcatcgcgctcaccgagtggcccaccagaatcaccgggccttgggcgtaggcgtcgataatctcgttcaggtcatgggcatagccatccaggcggctgtatttggctttttcgaacgcactcaagtctgacaggccggcgccgaccaggtcatacagcaccacgcgaaagcgctcgagaaagtgcggtgccaaggcattccacatggcctggttgcaaccaaagccgtgggaaaacaccagcgtcgagggaccgttgcccatcacatgtacattgttgcggtgacttaggtccatgggcgtcccgtagatggcttattgctatgcagcttatcggcagtttagatagtcgcaggccctgggtcacgcgtttgcacgcagataaggtaaagtcggcgccttcagggagagacttcaggtaaccatacatgatcgtgcttgtgcggcaatcggtgttcagcctactggccttggtattttccagcctgttgatcaccgctcatgcggacacctcgccgattggggtagcccttgatcagcgggtcattgacctgaccaacaccctcgactcgggcaccgtgctgcgcctcaagcaacaactcgccgaccttgaacaacgcaaaggcgcgcaagtggccgtattgctggtgccgactaccggcggcagtggcatcgaagactatgccaaccaactgttccgcgcctggaagctggggcgccaggacgtcaacgacggcatcctgctggtggtggccaaagccgaccgcacagtgcgcatcgaggtgggttatggcctggaaggcatcgttaccgatctactggcccatcgcatcattgaagaacgcctcactccagcgtttcgtcagggcgattttgccggtggcatccagcaaggcgtgaacgcgctggtggtactggtggacggcggcgacctgcctgaagtggccgggccggggatcaacccgcaatttttcgcgatattggcggcgtttgtcctgggtgcgctcgccggtgtgttgatcgccgccggcaagttgcactggcgcagggccttgatcctcgcggtggcggccacgctgttgctgacggtattggccggcggtcgagactggccgatgttcctgtttgcaatgccgctgaccttgttgattggcggcgcgctattcggcgcgttgtggcaggtgcgcacgctgttttacggcgtgatcgggttgctggcttacatcctcggactggtagtagcaaaccagtatgtggatgtcagtttcatccattggctgctgtggcccctgggcgtcttggtggtgctggggttgtacctggtgctactgctgctcatgagggagacatggcgcaccagccgcgcaggttttgccgtacgactgctggcggcggtggccgtgtacggggtggcggggcaggtaatggacggcgatcgcgacgcctggttgctggcatttcctatcgcgtcgtttgtcgcgctgattatctttggcaaggtcggcgaaggttctggctccggcggtgggtccagttcaagttccagcagctccagttccagcagtagttcgtcgagcggtggcggttccagtggcggcggtggggcgtctggtagttggtaagcaagtcaacggatgtgcccccaattcaaatctggaaactgggtgtttttagtgtgaggggacgatgttttatctgatgtaaggattttattttgtgagagagttgccaggagtagagaagcttgcctatttgttatccaaggcccggagcgcttcagaagtagatcagatctggatgtcgactggcttgaaaggaactatcaccgctattgttgccttggaagattataagcgggcgaatattccaggcgccgtaaaaaagtatgcgaaaggcgatgaggcggtactggttccctatttttcaggtggggaagtctattttttgaatgacaggattctgttttcctatcatcagcaagggcgtgcggactttaaaatcgactatagtttgatgtttgatactaatatggcctcgtatgtggatgcgttgatgcgcgggcgtccgttaaaaaccatgcatcacagagtggtcgcgtttgtcgatgatattttgaatgatgatctgaactttgattatttttactacatggcggagaacgtaaaagaggtgaaaaatattcaccagtgcgctgcgtattcacccttgaagttttggaagacgttaagtaaaaaattcaggaataacttggtcagtcttcagctgttcagaagcatcgattgcgctgaatacaaacgcacctctaatcctaaaccgaggttcacccaccgagaggccgcccgcagggcgattaatttcagccacagctattatgcttctgaagaagggcgtgcgcaggttctgagttttgccttgatgcaacgtgtcatcttgttgcaagtgattgggatggtgaagattcaattgtcatctaataagtcggcaaagcataaaatttccgaattttttgattatgttaatgacgtggttggcgtttatttggaccgtgaggcgattgttgcacataagtattttgttgatcctcggttaatttcgatgttggaaaaaataaaaaaaagccaaaaggcacccagaaggctattgaaaaaactcgacaatattgcgtgggacatggcggcgccacggctcatggagacattgatcatgtctcaaggcatgggagacttttttataccgatgtttataagcttcgatggcgggcttaagcaggtcttgaaagcctatgaagtaaaaggtgttgtgtttgatagccgccgtggtgggttgattccgttgccacgggttaataccgaggattattttaaagcgcacggatgtgctgacgcattattgaaaatcagtgagaaaagggatgagcggtccgacaaaccaacagcgaacagggacacggtgcatcagttgatcaaacgtgaatatggcgtgctgagaaaactgctgtcaacgcgaggtcgatgaccagtgccatggcacctattcgccaagggacagacgcttaataccagcaatcacccttcgtcaagccgcctttgagggcgtcctgtacatcggcatgggtaagcgtcgttgggctcgccgagctataccttccagggtgcaacccatgggggcggttgttcggcaaagccctgcgtgttacggcggcttaggcagaaaacagtgggttgtcacaacttggtccaaccaccgttgccgtcgggcgttatttcgaagttgatcggttcacgatgggcattgacctgagagctgtcgacgccagtgtgatccgcaggcgagacggcaggcccgaaggcggtgttggggtgccggatggcggcgttggcctgagtgtcatcgacgatcttcttgtccgaaggcaggaagttgtgttccaaccgagtgcggttggcgtggcttctatagtctttgctggcgtttttccagccgcctttgccattggctatttctgcgtcttccccggctgttttatccagagggttatgcctggcttgaccactgtcgatatgacctttgtcaacgggcgggtatgccggtgtgaaggggacggaactcttgattgaagtcatggctgcacctctttggtagcgaatgaattgacccgccaggacctggccctggctgggtgtttcgcaggttagcgcgcggtttggggatgctcaacgaggcccattcggaatgaatgtaacggaatgaaatcgctgcggggtcgagggtgccgagagagggattggctgtaggcagagtctcgcagagcgtttgcagcgctacggcctggcgtcggacagtgccgataaatccaggttttttacctgttgcaacgcatttgttcgcggtgcagcttttggcggcgtcacgcttggaaacataaacatgatcgcgcttgcgacggtgtgctcttagagagtcattgtcatttcatgccacgccatcccgccgtgatccgacggcgaaggttgtacgtaggtgtagcccatgcggcggtacagcggcacatgctgttccttgcacatcaggtggatcgtctgcttgcccattatcctcatgtgttgcacgaacgccgtcatcagcttttttgcatagcctttgccttgatgggacgggtcgaccaccaccgacatgatcaccacattcggcgcctcggccacatggcccaccaactccttgaaggcctcgtccgacatcaccacctcatgggcgcagcctgagttgatgaaacccaccactgcgccatcttcctcgaggatcaaaaagccttgaggatactgcgcgatgcgcgtggcgatttttgcaagcgttgcggcttcgtcaccttcgtaggcgctggtttcgatttcaaagcagcgtgcggcgtcggtgggcagggcgttgcgcaaggtgagggggggcatgggcggttccagggatgttcagtcaaaggccacatcatagagaaacgttgctcctttggcaccgtaaggcctctggccctgaaggctcaagcgggaggttcaacgttggtgccccgcaatcaaactgtggaagctgcctgcgatggcggcctgacagccgaagcctatctacctgacaccccgcgatccaaatgtgggagctggcttgcctgcgatgtcggcctgccagccgacacctacctacctgacaccccgcgatccaaatgtgggagctggcttgcctgcgatggcggcctgaaagccgacacctatctacctgatacccacgatccaactgtgggagctggcttgctcgcgaagacggcctaacaggcgacgcagttataccgggtacatatccattcctgcggtaacggccacttagggttccgccctgacggcgtctcactttcgaaaagcgcgaaagtaagcaaagcgctcttgccccaccactcggcacctcgcttaggctcggtgtgcccgtaatccgccagtgatttggggggccgccgccacgcgccatccatggcgcggggcggctaaaccggcatccctgccggtttgccccccaaatccctgtcgaattccggccagcgtggtttgacggggcgcctgagatcaaaagcagatcaagatcaagagcggctcgcttcgcatcnnnnnnnnnnnnnnnnnnnnnnnnnnnnnnnnnnnnnnnnaagcgaggtgccgagtggtggggcaagagcgttttgcttacttttgtctgggccggcattccggcttttcaaaagtaagacgccgtcagggcggaaccctaagcggccgttaccgcagcaatggatatgcacacaatccaactgtgtcgactgccaggccgccttcgcgagcaagcccgctcccacaatttgatcgcggggcgtcagctagataggtgtcggctggtaggccgccatcgcaggcaagccagctcccacagtgttcgatgtagtgtcagtttcaggaagatgaagttttatttaggaaacattcagcgacttcttggcaagatgtcgccacttctagtgtgaacgctcaccaggtaatcctatgacccgcattttgaccatcgaggatgacgccgtaacggcccgcgagattgtcgccgagctgagtagccatggactggacgtagattgggtggacaacggccgcgagggcctggtccgcgctgtgagtggtgattacgacctgatcaccctcgaccgcatgctgcccgaactcgatggcttggccatcgtcaccacgttgcgcaccattggggtgtccacgccgatcctgatgatcagcgccctctccgatgtcgacgagcgcgtgcgcggcctgcgtgctggcggcgatgactacctgaccaaaccgttcgcctcggatgaaatggccgcccgtgtcgaggtgctgctgcggcgtaaaagcacggtccaggaattcgaaaccgccctgcgcgtggccgacctggaactgaacctgatcagccgcgaagccagccgcgccgaccagccgctgaccctgctacccaccgaatacaaactgcttgagttcctgatgcgcaacaccgggcagatcctgtcgcggatgatgattttcgaggaagtctggggctatcacttcgaccccggcaccaacctgatcgacgtgcacattggccgtctgcgcaagaaaatcgacccaccgggcctcacgccgctgatccgcacggtacgaggctcgggctatgtcattgctgaacccctctaaaggctggcgctcttccagcagccgcttgctggcgctgtacagttcgttgttcgtggcctggagctgcatcctcatgggggtgctgtactacgaagtgtcgggctacctcagcgacttgtcgcgccattccctgctgcaacgccagcacctgttccagcgttttgacggcgaagagctggtggaggcgctcaccaccagcatgaccttcgacatgaagggcgtggacgcctatggcctgttcgatgagcactttcgtcccttgagcgggccgatccgcaccgtaccacccgacttgccgctggatggcaagatccacgccctgaccaattgcgtgcaatcggatgaccccaaactgcccaaggacagctgcgacgcggtggccacccacaccgaagacggccgctggctggtgttggtgcgcgccaacggctcgctgttcggggtcacacggattatctggcacgccctgctgtgggcgctctctttgaccatcatccccggcgctgctggctggcacctgctgcgccgtcgcccgttgcggcgcattcgtgggattcaggccagcgccgaggccatcgtcgccggcgacctcacgcaccgcctgccgctgtccgaccggcgcgacgagctagacatgctcgccgccatcgtcaacgcgatgctcgaccgcatcgaaaaactgatgaacgaggtcaagggcgtgtgcgacaacatcgcccacgacctgcgcacccccctcacccgcttgcgcgcccagctttaccgcatcaagcaacaagccgaggaagactcggcccacgcggtaaaactcgatgacgccatcgccgaaaccgacaccctgatggcgcgctttcgcgggctgctgcgcatttccgaactggaagaccaccagcgccgctcgggcttcctggtgctggacccgctgccgttgctgcgcgagctgcatgacttctatctgcccctggccgaagaaggcgaactggagttggtgttgcaggcgcctgactcactgccgtggattaccggtgaccgtgcgctgctattcgaagccctggccaacctgctgagtaattcgatcaagttcaccccgcccaagggcaaggtgatcctgcgggcagtcaacgacctgggcagtacgcgcatcgaagtgctcgactccgggccaggcattccagccgccgagcgtgcgtcggtgttccagcgcttctatcgggtcgatgagagtgatcagcaaggcggttttggcctgggcctgtcgattgtggcggcgatcatcaatctgcacggtttcaagctggaggtcggcaccagtgagttgggcggcgcccggttggtgctcgaatgccgccaacaattgatgccggaatagaaccctaacgcaatgtaggagcgagcttgctcgcgaaaaactcacgggcgccgcgtttattcaggaagcgcgcgttatcgttggcgtttttcgcgagcaagttcgctcctacatgcgtatcaagaccatgggcgctacaacacgctgcccatggccttgatcaacgccgggtcacgcgcataaatatccggcgcgtacaccaactcaccctggcgatccacttctaccgtccaataccccaacagcaccggtaccggcgtggccaacctgaattcatgggtttcgccggtcgccaacagctcatcggtgcgagtgcgttcggccggcgttaccagcaggtcgcgcaataacaacggttgctcgacccgcacgcatcccgaactgaacgcccgcgggcccttggtgaacaacggttggctgggggtgtcgtgcaggtacaccgaatacgggttgggaaagcgcatcacaatcttgcccagcgggttacgcgggccggcctgctggcgcagcaggatattgccggggcgcgcccagtcgacctggtcgggggtcaacgggtgaccttcggcgtcgagcacttgcaggttttgctggcgcaggtattcagggttgaggcggatggccggcagtttgtcctcgcgcatgatggtcggcgggatggtccaggtggggttgagggtcagccgggtgatgcgcgacttgagcaacggcgtctggcgttcggcccggcccacttgcaggcgggtttgccacaccgggatgccgctctggtacacgctcagttgcgcggcggccacattgaccacgacgccttcaggctccaggtcctgggccagccagcggaagcgctccaggttgatgcgcagttgttcacgacgcatcgccgggctgatattgagttcggccacggtgccggcgccgatcacgccgtcggcctgcaacgagtggctgagctggaaggctttcaccgccttgaccagttcgccctggtactgcttgccgttgccgctgggtaactgggccaggtagccgccgctgtgcaggcgccgcgccagttccggcacgcgagggtcattcatcccaggacgcaacaacgtgccctcggcgaccgggtcccaatggggcagcggttgctggcgcacgccggcataggcattgcgcaggctgcggtacaaatcggcgctgggccgggcctgatcgaaggcttgggccatgtctcgcaggccggtggcggcgaacgccagcacctcggtattcggatcgccactgggtggctgggaatgccagaggggctcaaagcgcgattgctgcaggcgcccgtagtgcaaatcctgcagagcttgcaggtactgctggctgttggcgatatcgctgcacagcacgttggccgtggcatccgccgcaggcaagctatagtgggtggggtccaggccatcgtcggcaagcatcagcaactgggcatgcaaggcttgccggcgttcgtcagccgcccatagcggggcatcgccctgctgctggtaaaaggtttgcaggcgcgccaacgcggcggcatcgatacgcggcgcaaggtgcgggcagacactggtcaactgcgccaaggcctgttgcagcggcgcgagcgcgaccggtgcaggggtggtgacgggcagtggttctaacggcagcgtttcggctgtagcgaccaatggtgcaacgagcaggcaaatgctcaagtaacatgcgtgttttttgaacaattgacttagctccactccacagcggggactcgactgtagatgctgacttttatacgcaggcgcaggctaaccagcctgggcttgatcaccgggtgcctggctttattgagcaatgttgcgctcgccgccaatggcacctctctttccctgtatagcagcctggcgcgctctgctccagaactcaatcccaccgtcctcaaaagcgccctgagcgccgtgcagtgcgcggtcaataacggcgaggaacgttccgatcgcctagcggttattgactactcccagccctcgaccgcccgtcgcctgtggatcttcgacttgcgcaaaaagaccttggtattgcgcgacctggtggcccacggtgccaagtccggggaaaacttcgccacccagttctccaatctcgaaggcagccaccagtcgagcctggggttgttccgcacccaggaaagctacctgggcgcccatggctactcgctgcgcatggatggcttggagccgggcttcaatgaccaggcccgcgaccgcgccatcgtgattcatgccgccgattacgtcagcccgttgtggagcaagcgcgaaggccgcattggccgcagccagggttgcccggccgtgcgcccgcaggtcgcccgccaagtggtggacaagctcaaggacgggcagttcatgttttcgtggtaccccgaccagcgctggctgaagtcatcgacctacctcaattgcaaaccccaacaggtggcgagtagtcgtacaatccgtggcggatagcctgtccccatagataaaagagagcgtcgcatgcttctacacacctccacctggatcgaaatcgggcagttcctggaacgcagccgcacggtggtgattcccatcggctccaacgagcaacatggacccactggcctgttgggcactgactggatgtgcccggagatcatcgcccaccacgcccagaagcacgccgacatcctcgtcggcccgaccttcaatatcggcatggcccaacaccacctgggctttcccggcaccatctccctgcgcccttccacctttatcgctgcgattggcgactgggtgcgttcgctggccgggcatggtttcgaaaagatcctgttcctcaacggccacggcggcaatatcgccacgattgaagcggcgttctcagagctgtacgccgaagccagcttcgcccgccgcccggccgggttcgcgctgaagctggtgaattggtgggacctggaaggcgtcactgacctggcccagcgtcaattcccggtcgggcatggcagccacgccacgccgtcggaaattgccgtgacgcagtgggcgtatccggactcgatcaaatctgccgagtactcaccgcaaatcgccaacaccggcccgattcgcgaagccctggacttccgtgcgcgcttccctgacggccgcatgggctcggacccggcgttggccaccgtggagaaaggcggtgagttggtggcgttggcggcgcaagggctggtcaaggccgtcgacagcttcagcaacgaagccaaaccctgagccaaatggggccaataccctgtgggagcgggcttgcccgcgaaggcggtgtgtcagccactgaatcttcaactgaaccaccgctttcgcaggcaagccagctcccacattggttacagggtggggttgcggtgcatgtgcgggtttatttgcaatcctgggcggcctgctcaagccgtgacggcttgatcgccgaagccagcggcttgcgctcatacaggaacaccttggtgccgtcctgggacttgtaggcctccagcacatcatcggcggcaatcttgctggtcaacagcaccttggcgtggcgcgagttctgggtaacggtcgaggtgatgccatgcttttccagcttgggcaatacgcattgcacatagccgtcgggggtcttgttggtttgcagggtcagcgatggggcattgggcgccgtgatacagccggtcagcaacaacgaagcacaagccagggccggggcgaagaaagagcgcatattcattcctgaaaataaccaaatagggttcacaaccattcgcgggtcaacctgcgcgaaccagggccttgagcgacgcatcgaactgcttcagggcatcttgctgtacatcgcgttgttgctcgatcagtgcagcaatctccggggccgccttgtcatgcacccacacggacggcacgtgcttgtccaccgagccttcggccttggcgataaactgcaggttcgcatcaaagaagcgtgcgacaaagcgcgcctcgacccggtcattacgctgggtgagcaattggttatgggtatcgagcaccaccaccacatccgggtgcgcctgcaccagggcatccaggctgctatagaccgtcaccgaggcaaaagtgccctgcaacgagtgcatcaaccagtcgatcgccagttccgggtcggagctgttgacgaacgcctcgcgaatccgcccatccagcgcatccttggcgccgttcagtgccatggcgtggtagcgttcgaggtagctgaggttgtcgcgggtgttttcactgaacaacacccccaccgactgggcacgctgcagggagtctacgctacccaccaggggcagcaaatggcctgtacgcacttgatcggccatcgccggggtggtcatgaccgcggtgcccagcatcagggccatcaaagccaactggataatcgtcctcatcgcgcattttccttgggctgcgtctcgatgtgccgattctgcgcgtttggcgaaaaaacagaacttgtgatccttgatggtgactatcatttgaaccgatagtgtcaggccgcccataaaatctataaggaccccgccatgaagccctaccagaaaatcttcgatcgtatccgcgaggcagtactgccagagtttcgcgagcgggtcgccgactacctggtcgagtacgaaaccgtgctgctggactcaaacgccgacgccgcaaaaggcagcgccagcgccgagcaactgcgcggctacttgcgcggtttgaacaccatgcgcgtgctgggcatggctgattgggaagacctcgaccggcgtgtcgcccagcaggcagagctagagcgcgggccgtcgcagctcgacccactcccgcactgacggccgctgccactggcgttgcgcgtaggccaccagttgcgtgggtacggcgtcaccattgaggatcaggcgattgagcatcaccgccaggtccacatcggcaatcgaccactggccgcacaggtactcgcggttatccgccagcaacgcttgcgccgcgctgatcaacttggtcgcggcggcttgagcgtctgctgacaacggcggcctcttctgcccacagaacaccaccagcgtcgagcgctcctggcgaatcggcagcaggtcgctgcgtagccacgcctggacctgtcgcgccctcgcccgctgctgcacatccgccgggtacacgctggtctcggggtaggcctggtccaggtactcggtgatggccgaagactccgacagcgcaaaatcaccatctaccagggtcggcacgcgctgggtcagggagcgttgggcgaaatctgccgcttggttctgccgggcatcgaggtccagggtgagggtctcgaacgccaggcctttttcgcgcaaggcgacaaacaccgacatggcataagggctggtaaacagcgaatcaacgtagaggtgcagcgggccttggctcatgggcaatctcctgggatgagccatcacgctacgagatccgggccgataaagacaatgcagggtttttatgggggcattcctggcgggaatagcgcgggtagtggcaatattatggctaccgctgattttcaaggaaggaacagcacatgaagcaagcagttgtggttatccacggcatcggtgagcagcgcccaatggacaccttgcgcggctttgtcgaagcgatgatccccacggacgcccccgatggcaaacctctgtactggagcaagccggatcggctgtcgcgcaacttcgacctgcgcgtactgaagtcctcgggccgcacctcgacagatttctatgagtactactgggcccacaagatgcagggcaccaagctcggccatctgctgggctggctgtgggacatcttcaagcgcccgcgttgcgacattcccgacgccatcgtgccgatctggcgtagcacgcgctggacggtgttggcgttactgctattgattgccagcggcgcactggccgcagcctggggtcagttgcccgccaacgacaaccccttcgcgctgatccccctgctcctcgcggccatgggactggggctgcgctattcggcgctggcgtacctgggagacgccgcgcgctacttaagccccaacccgcagaacgtaatggtgcgcgagcagatccgtgctgatggtgtagacctgctgcgcgccctgcacaatcagggtgactacgagcgcatcatcgtcgtgggccacagcttgggcagcgtgattgcctacgacatcgtcggctacctctggcatgaataccacgaccaattgacccaactgaaccccagcaaccgtgagctggcgtcccgttatgccaaccgcgaaccgctgcaaccggtggtcaaggaagccctgcccgcagccggcgccttgctggacggcagcctgggcagcctgttgaattttcgtcagcaacaggccgaggcgttcgttgaacagcgcggcctgggcaacccctggcgcatcaccgacctggtcaccgtcggcagcccgatggcccacgccagcctgttgctgggccgcagcgtcagtgacttccagcagcgcatggagcgccgcgaagccccggcctgcccgcctaccgaagacacccaaggctacggctacaacgcccgccaaccgctgatgctcggccaaaagcccttcaccccgcactacctgcaccacgccgcagcctttgccgtcacgcgctggaccaacctgtacttccctgcccccttcggcgtattcggcgacatcgtcggcggcccggtcaagccggtgatgggcggcggcgtgctggacttgccggtgaccgtgggcaatggcaaaggctggctggccagatcctggctcagccacacccattactggagcgaacgaggcggtacacagggttacctcagtgcactgggcaaggatgaacaggcgatcacccaaggcccgcgcccttcggccactgaagcgttgcggtgggcgattgaccttaagggggtacggcggtttcgccgtacgaaggtagagcagcgggcggcggcagaagcctgagagtccccctatcagtcctcttgcactgacaggagaaccgtcaacaacgcccccacccctaaacttaaagcgagtaaagctacgccctgcgtgccaagaggaatgagcaatgacgccaacgttccgaacagcagggctaccagctgttgtaaaaaactgaacagcatcattgactccattccagggtatttttttactgcaagagacgcgacacagggatacatcattgcctgggcataccaggctgcaaaatatgccagcaccgtaaattggcgatccaaatatccaaaagttgtaaatagaaatactgacgtcgctacaaccaacacactactacctgtgattgaaagtgcataaacactcgtaaaattcaatgcataccttacagtcagcgcccccgaaaaataggcgagccctagccatactccgagcattccgtattgcacacttccccaccccaaaagcacgtcaaagacaaagacgcccacaccttgatacacgacaaacaccccatagctacatccaccgactatgaccggcaaataaaagctgggccgactgatgatgcctgcataccctgaacagctgacgcgacgcgttctatccatgtccagaaccgacaaaacccctgctgccagcagcactaggacaagggttataactgagccaaaagccatgattactgccactacttcccagcgaaaaaaagaaattaaaaagccgcctgcgagttgtcctaccaccaaggcaaaaacaaatgaataggataaaaaagacaactgcttcgccaggcgtgctcccgagtagatctcggttaacaatgcgcgcccaattaaggctgctccaccaccgccaatgccttggagcagcctggaaagataaaaaccatcattatcatggacccatatagataaaatacttccgctaaagaagacgccacaaaaccccagcagaacgactgaccggccaaaaaatcgaataagttgtacggcaaaaaccaacggaactgcggcaccgcccaaatagattagtaaggcagtgtagccttcggcatcactcataccgaaagcatcaacaatatcaggcgtgacgggcaaataaagcgtcacgcccaactgagccatcatggtagtactacaggctaaagtcagcacccttacattcgactgcacgtgcccccccaccaaaattagttaacttggcagcgatgttttaacacgcgagagcattttacaagcagacaaagtatgggattagccccaaaactttgtaggctatttcctcaggtaacaatgactacggtttagctccatactagccaacgcaacacatcggggacccgttaaaggcgcttgagcaagcgccccctcctgtacctatcccgcaaacccaccctcatccaaaaaaacctgttccgcagcggtggtcgtcctccccaacaccccattgcgatgcggaaaccgcccgaaccgctcaatgatatcggcatgctccttggcccagtgataggtgctgttatccaactgccggttcagggccagagaccgttgctggtcctgtgggtcttccgaatgttcaaaaggcaaatagcagaacgcgcgcaactgaggttcaacctgttgatccaaccccgcgtccaccatctttcgcgcatacaaccgggccagcgggtcggtggcgaacatgtgtgccgtgccgcgaaaggcgttgcgcgggtactggtccagcaggatcagtaacgccagcgcgccatccgccgtggtcaaccagtgttcgagttcacgccgcgccgcctgcatatgggtggcgtggaagcggtcacgaaagtccgcatcgaactcttcgtccttggcaaaccaacgcttgggccccgcctgtttccagaacgcgattaccgcttcggccgattgaggggtcatgcttacctcgcttaatgttatagaataacgtcaatattgtgcctgcgtgtgatccttaacttatgactgacgctatgactttacgcaaacgcctgctgtccatcgacgccctgcgcggcctggtgatcctgttcatgttgctggaccacgtgcgggaaaccttcttgctgcaccgccaggtcagcgaccccatgaacattgacagcaccgagccagcgttgtttttcagccgcaccctcgcccacctgtgtgcgccggtgtttgtgctgcttaccggattgtcggcgtggctgtatggccagaaatatcagggccgtcgcgacgtgtcggcatttttgttcaagcgcgggctgttcctggtggtgctggaattcaccctggtcaacttcgcgtggaccttccaactgccgcccagcgtgatctatatgcaagtgatctgggccatcggcatcagcatgatcgcgcttgccgcgttggtttggctaccgcgtgcctggctgatcggcttggcgctgatgattatcgccgggcacaacctgctcgatgggctgcactttgcagcgggttcgatgtggcatgtgccgtggacgatcttgcatgaacgcaactggattgaaatctctgaaaacctgcgcctgcgcaccacctacccggtactgccatggatcggtgtgattgccctgggttacggcctcgggccatggtttgccaatgccacgctgccggctgtgcgtcagcgttatttactggtcgcgggggtgggcgcgttggtgggctttgggttggtgcgagcgctcaacggctatggcgagcagccttggcaggtgtatgacagcagcgtgctgacgctgatgagctttttcaatatcaccaaatatccgccttcgctgttgttcctggcgttgaccctggggattggcttgctgttgctgctggcgtttgaacacgccgggcataagcgctggatcggcgtactggcagtgttcggcgcggcgccgatgttcttttatctgttgcacctgtacgtgttgaaaatcctctatgtcgcctgcgttgcattgtttggcctcaaccatggcaattactttggcttcgacggtatcggtgcggtgtggctggcagcgctgctgttgccgattgctctgtacttgcccgtgcgttggttcgccggcctgaaagcccggcggcgggacctggcgtggctcaaatacctctgacctgatgcaggcaaattgtgggagcgggcttgctcgcgaaagcggtgtgtcagccactgctgttgtgactgaaagaccgcattcgcgggcaagcccgctcccacagtttttaaccgcgccgggctcaggaatcaggccagttcggcacgcagttggcgagcggcggtgaccatgtggatgagcgccgcctccgtttccggccagcctcgcgtcttcaagccgcaatcagggttcacccatagacgctctgccggaatccgcttggcggccttgcgcagcaaattggccatttccgaggcatccggcacccgtggcgagtggatgtcgtagacccccgggccgatctcattcgggtaggcgaaggcttcgaacgcgtcgagcagctccatgtccgagcgtgaggtttcgatggtgatcacgtcggcatccatggcggcgatggactcgatcacgtcgttgaattcgctgtagcacatgtgcgtgtggatctgggtttcatcgcccacgccactggcgcacaggcggaacacttcggtggcccagtccaggtagtgctgccactgcgcctggcgcaacggcaagccttcacgaaaggccgcttcgtcgatctgcacgatcttgatgccggccgcttccaggtccaccacttcgtcacgaatcgccagggccagttgccgggcctgcatttcgcggctcaggtcttcccgtgggaacgaccacatcagcatggtcaccgggcctgtgagcatgcccttcatcactttgtcggtgagcccttgggcatagcgaatccactccacggtcatggctttcgggcgcatcaagtcgccgacaatcaccgcgggtttcacacagcgcgaaccatagctctgcacccagccaaagcgggtgaacgcgtagccatcaagttgctcggcaaagtactcgaccatgtcgttacgctcggcttcaccatgcaccagcacatccagcccaagattttcctgcacctcaaccgcatgcttgatctcactgtgcatggcttcgatgtattcggcttcgctcaacttgcccgtcttgtacgactggcgcgccaggcggatcgacgcggtctgtgggaacgagccgatggtggtggtcgggaacagcggcaggttaagcccggcccgttgcttttcgatgcgctgggcaaacggcgactgacgctggctgtccagcgccgtgatggcggcgacacgggcctgaacagcgggtttatggatacgtgacgatgcagcacgagccccctgcacggcgcggctttcggccagggcggcgagtacgtcaggtgctgacggctggtcaactgccttggccagtagcgccacttccgcgcacttttgtacggcaaaggccagccagcttttcagttcggcatccaactggtcttcccgctcaagatccaccgggctgtgcagcagcgagcaggacggcgcaacccacagacgatcgcccaatttctcatgggcatgctgcaaggtagccagggctttttccaggtcgcagcgccacacgtttcggccgttgaccacacccagggacagcaccttgtacgctggcaggcggtcgaggatggtcgggtactggtccggcgcacgcaccaggtcgatatgcaagccatccaccggcaggttggcggccaggccgaggttttcttccaagccgccgaagtaagtggccaccaattttttcagcgggtcgcgctggatcaggttataggcgcgctcaaaagcgttcttccagtcctggggcagatcgagcgccaggatcggctcgtcgatctgcacccactccacgcccaaatcggccaggcgctggaagatctggccatacagcggcagcagtcgttcgagcaggtcgagcttgtcgaagtcagcgcccctggccttgcctagccacaagtaggtcagcgggccgatcaccacgggcttgacgcggtaccccaggtcgagcgcttcctggacctcttcgaacagttggtcccacgccaggtggaattgctgatcgacgctgaactccggcaccagatagtgatagttggtatcgaaccacttggtcatctcctgggcatgggctccgccgcagcagctgtcgctgacgccacgggccatggcgaacaaggtatgcagagtggcctggccatcggccgggcggaatcgctcaggcaccacgccgaacatcagcgagtgggtcagcacctggtcgtaccaggcaaaatcacccaccggcaacagttcgatgccggcttgctgttgcagcgcccagtgggtgctgcgcacatcacggccaacggcgcgcaggccggcttcgtcgagctctcccttccagaacgcttcctgcgcttttttcagttcacgatcgcgtccaatgcgtggaaacccgagggaatgagcgactgccatgacttacaactccgatggtgtgattgatggcggtcattgtcggcagaggggtttcttgagacaaactcattttgttctggatcatcacaagatttgctcatttttaggtgggcctgattttagcggcgctactgtagggtttgcggtgccagggctggcgtcatcgcggcctcgcttaggttcgagcgctcccacagggggacggggtgattcttatgaacggtcatacttacgccctatgcttaacgtggcgcgcaaaaaccgccggctaacctttcgatctgttccaagtgcgggcacaatgcgtgtccttttttggcaggcaccgccgcaggctctcaaaaatgatcaaaacgccgtactacctcatcgataaacagaagcttctggtcaacatgcagaagattgcctacgtgcgcgaacagtccggcgccaaggctctgctggcgctcaagtgctttgccacctggtcggtattcgacttgatgcagcaatacatggacggcaccacctcgtcgtcgctgtatgaactcaagctcggtcgccagaagttcgaaggtgaagcgcacgcctacagcgtggcctgggccgacgatgaaatcgaagagatgctggagaactgcgacaagatcatcttcaactccatcagccagctgcagcgttttgccgaacgcagcgaaggcaagacccgcggcctgcgcgtaaacccacaggtgagcagctccgactacctgctggccgacccggcgcgcccgttcagccgcctgggcgagtgggacccggtgaagatcgatggcgtgatcgaccagatctccggtttcatgttccacaacaactgcgagaacggcgacttcagcctgttcgacaagatgctcggcaccatcgaggaacgcttcggtacgctgctgcacaaggtcaagtgggtcagcctcggcggcggcatccatttcaccggtgaaggctatgcactggacgcattctgcgcgcggctcaaagccttctccgagaagtacggcgtgcaggtctacctggaacccggcgaagcggcgatcaccaacagcgcctccctggaagtcaccgtgctcgacaccctctacaacggcaaaaatctcgccgtggtagacagctccatcgaagcccacctgctggacctgctgatctatcgcctcaacgccaagctggcgccgagcgagggtgaacacacctacatggtgtgcggcaaatcctgcctggccggggacatcttcggcgagtatcaatttgatcgtccgctggccatcggcgatcggctgtcgttcatcgacaccgcaggctacaccatggtcaagaaaaactggttcaacggcctgaaaatgccgtccatcgtagtgaaacaactcgacggtacagtcgaggtggttcgtgaatttggttacgacgactacctgtccagcctgtcctgagctggcggataaaggagagataaagcaattgaaaaagaacgttcttatcattggtgcaggaggtgtcgccaaggtggtggcccacaagtgcgcgcagcacaacgacgaactcggtcgtattgctatcgcgtcgcgcaacatctccaaatgccaggccatcatcgacagcgtcaaggccaaaggtagcctcaaggttcccgccgatatccaagccttcacgctgaacgccctggacgtggaagcgaccaaggccctgatccgcgagaccgaatcgcagatcgtcatcaacgtcggttccgcgttcctcaacatgtcggtattgcgtgcctgcatcgacacgggcgtggcttacctggacaccgccatccacgaagagccgggcaaggtctgcgaaaccccaccgtggtacggcaactacgagtggaaccacctgcaagaatgcaaacagaagaacatcaccgccatccttggcgtgggcttcgacccaggtgtcgtcaacgcatatgccgcgctggcgcagcaacagcatttcgaccgcattgattcgatcgacattctcgacgtcaatgccggctcccatggcaaatacttcgccaccaatttcgatccggaaatcaacttccgcgaattcaccgggcaggtgtggagctggcagaacagccagtggaccagcaacaccatgttcgaagtcaaacgcaccgacgacctgcccgtagtcggctcgcaaaacctctacctcaccggccacgatgaagtgcactcgctgtcgaaaaacctcgacgtgcccaacgtgcgtttctggatgagcttcggcgaacactacatcaacgtgttcaccgtgctgaaaaacctcggcctgctctccgaacagccggtcaagaccgccgaaggcctggaagtggtgccgttgaaagtggtcaaggccgtgctgcccgacccgtcttcgcttgcgcctggctacaccggcaagacctgcatcggtgacctggtcaaaggcaccaagaatggccagccgcgtgagatgttcatctacaacgtggctgatcacgaagaggcctacgccgagaccgacagccagggcatctcctacaccgcaggcgtaccaccggtagccgctgcgctgctggtggcgcgtggcgagtgggatgtgaagcacatggccaacgtcgaggaactgccagctgagccgttcctcaaggcgctggatgtgatgggcttgccgactcggatcaaagacgagaacggtgatcgggcctgggatgcgacggcctgataggcgatagctgaccgagcaaaaagaatgcgcccccaggggcgcattttttgtgtgggctcacctacagcgcgaagaacaatgaggatcaaaatgtgggagctggcttgcccgcgatggcggcgtgtcagtcaattaatctgtcactgaactgacgctttcgcaggcaagccagctcccacactgaatctgcagcgcaaacggagcttcggttcattccagattccgcgccgaattactcaacgcccttgagcactgcaacagcgccggcgccagttgccgttcggcatccgcctggcaccagcggctggtcggcgccaccacatgcactgcggccacgggccggccattgccgcccagcaccggcgcgccgatggtcatgtcgccgaggaacagttcctgagtgttcaccgcatagccctgcgccctcacctgctccaaggaggccatgatcgcctcgacgtcggtcagcgtgcggctggtatgcgccactcgctggctgttctcgatcaacgccaacgcctcctcctgcggcaacgcactcaaatacgccctccccgacgccgtgcagtacatcggcacccgtgagccaatcggcatatgcaccggcacgaaccctgcgctaacaaagcgcgcgatgtacgtcatgtcgtagcccgccggctcggtaaggcacgacgtctcgccggtcaatcgggtcaactcggacaagaacgggttggccacttcgatcaacgaatgcgcatccaggtaactgaagcccagctccaatacccgaggggtgagttggtaatggcgtgtgcgcgagtgtttccgaaggtaacccaggctttcgagggtgaacaccatgcgctgggccgagcttttggtcatgccggcggcctctgccacctctgcaaggctcatgctacggcgctgtgcgctaaaagccttgagcaccgacaggcctttttccagggattggttgtgcaaactgttgcggtcttcggacatggcgaactcgcgggcaggtggctcaggcgtggtgatatttctaccttaaaagctgattaatgaccattaaatatcgcatatcgatacgaaaggttcatttttaaaactttctaccatcatttacgatttttctgattcgaaatggcatagagcttgcgatttcatcggcagccgcttgcggtactgactttccgttttccgtctggagtaacccgatgaacagtctttcgcccttgtttcgccgccttgccttcggcctgtgcgccacgctctgcatcagcgtcgcgcacgcaggcagtgcgtcctcgtacaaagtcggtgcaaccgccagtggttcgccgtttaccttcctggatatcaagagcaacagcatccagggcgtgatggtcgacgtggcggaagccgtcggcaaggccggcgggttcagcagccagatcgagcagaccaactttgccgcgctgatcccgtccctgacatccggcaagctggactttatttccgccggcatgctcaagaccccggagcgtacccaagtggtcgacttcagcgccgcggtttacgcctatggtgaagggctgatcatcagcgccgacgacgatgccgcctaccctgaccttatgccgctcaaaggccaggtcgtcggcgtgcaagccggcacaatcttctacgaccaactgaacaagctgggcatcttcaaggagatccgcacctacgactccatcggtgagatggttcgcgacctgtccctgggccgcatcaaggccgccgtgggtgaccagccggtggtggcctaccagatccgtcaaaagctgttcaaaggcgtgaaactggcgcctgactacaagcccactaacgtcggcgaagtgtgcctggtggtgcgcaagggcgatgccgcaacccttgagcgcctgaacaccgccatcgccagtatcaaggccgacggcacgctggacagcatcctcaagaaatgggggctggacgcccaggagcgcccatgaacctggctgagttcctgcagaacgcccaggacttcctgccgatcctgctgcaaggcgcctgggtgacgatccagatcaccgtgctgtcgttcctgctcagcagcgccctcggcctggtgctggcgctgctcaagctgtcgccgattcgcgcgctgtcctggaccgccagcaccatcatcaacgtgatccgggggctgccgattatcgtgcagctgttctacatctacttcgtgctgccggacatgggcatccatctcacggcgttttatgccggggtgatcggtatgggcatcgcctactcggcgtaccaggcagagaacttccgcaccggcatcatcgccgtcgaacaaggccaacgtgaagccgccgaagccttagggatgcgcacggggctgatgatgcgccgggtgatcctgccccaggcgtttcgcatcgccctgccgccctacggcaacaccctggtgatgatgctcaaggactcctcgctggtgtcgaccatcaccgtcgccgagatgacgcgccagggccaactgatcgcctcatcgaccttccagaacatgaccgtctacaccctggtcgccctgctctatctgttgatgagcctgccgctggtgtatggcctgcgtcgcatggagcagtacctgggccggaggaaaaaagcatgatcgagattcgccagctgcaaaaacactacggtgaccaccacgtcctgcacggcgtcgacctcgacgtggccaagggcgaagtggtgtgcctgatcggcccctcgggctcgggaaaatccaccctgctgcgctgcatcaacgccttggaagcctacgacggcgggcatatcaacgtgttcggcgaaaccgtacaacgtggcagcaagaccgtacacgctctgcgcagccgcatgggcatggtgttccagcgcttcaacctgttcccccatcgcacggtgctggaaaacgtaatggaaggcccggtgtacgtcaaaggcgaatcgccccgccaagtccgcgaagaagccctggtgctgttggaaaaagtcggcctgagcgccaaggccgacgcctaccccgaacagctttccggcggccagcagcaacgcgttgccatcgcccgcgccctggcgatgaaacccgacgccatgctgttcgacgaacccacctcggccctcgacccggaactggtcggcgatgtgctggcggtaatgcgcaccctggccgatgaaggcatgaccatgatcgtggtcacccacgaaatgggctttgcccgcgaagtggccgaccgcgtgtgcttcctgcacggcggctacatcgtcgaaagcggccccgctgaacaggtgctgggcaacccgcagcatgcgcgtacccaggatttcctgcggcgcgtgctgcaccccacaggcaacacgcggagcctgtcatgaaatcgttgtggtcggcgactgcgccgtcagtggtgccaacaccggcattgaacgagtcggtgaaggtcgacgtggcgattgtcggagccggatataccggtttatcgacggcgctgcacttggcagagcgtggcgtgcgcgtgtgtgtgctggaggcccatgagccaggctggggtgcctcggggcgcaacggtgggcaagtcaaccccacgctcaaatatgacccgcagcagctggtacagaagtacgggccggaacgcgccgagccgttgatcgccacggtgtcgaactcggcggacctggtgttcaagctgatcgaacgccatggcatcgattgcgcgccggtgcgcaagggctggatgcaggtgtcgtacagtgaaaaggcggtggccgggctgcatgctcgggccgaacaatgggcccgacgcggcgtaccagttcagcgcctggatgccacggcggtggcgtcacgcatgggcagctcggcgtttgccggcggctggctggatggccgtgccggggccattcaacccttggcgtatgcccgcgggttggtggcagcggcgttggcggccggcgcacgggtgcatggccacagcgcggtgacaggcctgcagcgccagggttcggcttggcaactgcagacagccggcggtgcgcaggtcacggcagatcaagtggtgctggccaccaatggctacagcgatcacttatggcccggcatggcccagagcgtccttgcggccaacagttttatcgtcgccaccaaaccattgagtggccgcgcagccgaaagcattttgccaggccaggaaaccgtgtcgaccgcgcaacgcttgctgctgtattttcgcaaagacgcgtatgggcgcctgctgatgggcggccgcggcctgttcaacgaccccaccggaccggccgactttgcccacctggagcgctccctggcgctgctgtttccgcaactggggccattggaattcgactaccgctgggccgggcgcatcgcaatcacgcgggacttcatgccccatgtccacgaaccggcgccggggctcaccctggcgttgggttgcaatgggcgcgggatcgcgttgtgtaccagcctgggccagcaattggccgggcggttgtgcgacaacacggcaggcttcgcctacccgataacgcccttgcagcgtttgcccttgcatcgcttgcagcggttctacattggcgcgggcgtggcctggtatagcttgttggatcggttgaacgtcggttaaatcgccaaatgctcttgcaactgtcaattccaacaggttaccgattgcgtgaatgccgttagcctgagcgagccagtcatcgattggctcacccattcaccatgtgcgaaaggattcgtccatgaaacggcaagcctcttcaaacaccctcacggtacgcttggctggcttggtctatagcacctgctgctacctggttttcttattcaccttgctttacatgatgggcttcatgggggctgtggtcgtacccaaacacatcgactccggcgcgcgcatcgactgggcgctggcactcatgatcaatacgtcactgattattgtgtttggcgtccagcacagcgccatggcgcgtaaacgcttcaagcgctggctggcagtcttcgccccggcagcggtggagcgctccacctatgtgctgctctccagcctgatgctcgcgctgctgttctggcagtggcggcccattacgcacaccgtttgggaagttgacgccgcctgggccaaggcactgctgaccggcctgttctggctgggctggggcatcgtggtgctggcgacctgcttgatcagtcacttcgagttgttcggactgaaacaggccattgatcgctggcgcaacgccccaccgtcaggcctgacattccggacgccgctgctctacaaagtcgtgcgtcatccgctgtacctgggcttcctgatcgccttttgggcaacgccgcatatgaccgtggggcatctgctgtttgcgctggggatgtcggcgtatctcttcatcggcgcccgtttcgaagaacgggatttggtggcgctgtttggtgagcggtatcggcgctatcagcgtgaggtgggcatgatcgtgccacgcctcaacaaaccccgccactaacccactgtaggagcgagcttgctcgcgaagatcgtcaacgataacgcgggcaacctggatgaccgcagggcctgggcgtttttcgcgagcaagctcgctcctacagtggggtatggtctcggacctttcccacagttgtttcaggttgtcgctcggaagttcactgactaacctctgggccgtcgctgccaattcagcggccggatttgaccgtccgactcccaactgcatctgtgccacatcgaatcaggcgttttctttacgcctgctgtatcgtgtcgcggcagctgtacgcgggatacctccgggtatgccgggctccttgggaccggtcggtcaacccgcgtatagctgccaccctaattcgtttgaccgcgaaccgtggcagctccatatcccttggagtttcaccatgatcaaagacagccccaacccaccagaacaactcttcaatgtgcgccccggcctaggcaccgaaaccctgctgatcaacgcctcccaggatctagcctccatcagtgacatcgctactcatctagcctttgagatcgacggtacccaacgcaacgtagcgctgggcatctgccgcatgctcgaaggtgtgcagttgctcgtagacaaggcgctggatgacacccacccagccacttgacctgatgctcgcgccgcgcccttacccactgtaggagcgagcttgctcgcgaagatcgtcaacgatgacgcgggcaacctggatgaccgcagagcctgggcgtttttcgcgagcaagctcgctcctacagtgatcgatggcactgaaaaaccgctatcgcaggcaagccagctcccacaagaacgatctcaaaacaccgaccacccaatccgctcactcaacaactccaacgccttcatccccgccagcgagttgcccgccgcgttcaactccggcgaccacacgcacaccgtaaactgccccggcactaccgcgacgatcccgccgccgaccccgctcttgcccggcaggcccacgcggtaggcaaaattgcccgcctcgtcatacagcccgctggtagccatgatcgagttcacttgcttggtctggcgcgccgtcagcacctgctcgccactgtgggcactcacgccttcgttggccagaaagctgaacgctcgggccaggtccaggcagctcatctgcaaggcgcaatagttgaagtagctgtgcagcaccgcgtccacatcgttatgaaagttgccgaacgacttcatcaagtaggccatggccgcattgcgcgcaccatgctgggcttccgactcggccacaacactattgaccaggatttgcgggttgcccgacagccgccgtacaaagtcgcgcatcgacagaatcggcacggcgaagcgtgactggttgatgtcgcagatcaccagcgcgccagcgttgataaaggggttgcgcgggcggccacgttcgaattccagctgcaccatggagttgaacggctgccccgagggctcgtggcccaggcgttcccagatggtttcgccaccatggtcgatggcctgcaccaggctgaagaccttggaaatgctctgcaccgaaaacagcgtatcggcatcaccggcgcagtaagccgcgccgtcgttgccgtagaccgcgatgccgagttggtgggcgggcacgtcggccagcgcgggaatgtaatcggcaactttgccgaggccgatcaaggggcgcacttcgtcgaggatcgactccagcagcgcctgcatagcttgtcctgtcatctttgtttgaatcagtgataaacgaggcgcggaggatacttcagtgggcgcgcaacacccacacaatctctaccacccgctcggcaaccaccacgtagatcaggatcaataacagttgcaacgccaagtgataacgcaacttggccagccggcgaatgccgtcgctgacgttcaacaacatcagcagcgtcgacagcacaatcaagccccaccccgcgacgctggaagcaaacagaccgatcagcaaatcgtgcggccccaccagcgcgttggtccccgccgcaaacaacagcgcgcagaccaacaggttcttgacgttgtcaaaaatctgcgtgctcaggtcgttttccagcaacgccagataccgcgtccataaagtgcgcatgcttgattaccgagtgggaaggctcgtcaatcaaggtagttcaattgtggacgctgtcgagctttggccaggcttagaaatgcgccacatccgacacttctgtgtccagcacgtcctgggccagcgcccaggcgcggtccttggattccaccaccagcagcgggtagccccaggccttgccgaacgtcacggcgaagggcttgagagccaggcgcttggcggcgctgggctccacctggatcatgcctttgacgtaggcgcgcaaggctgctttgtttttcttcatccagatagaggcgcgcttgcgctcttcgtgggcgtgttcgtgattgttttcatccacggttttttcgtgcagcagcaagaagggctgctcacgggccaacaaatgttcgaaggtcagtaaggcatcttccggcccgccgtcgttaggcgcgtcgaaaaagattttcaccacggggaaagttgaactgtcgagtcgcatggcaaagctccttggatgagattggctctcatcatagagcgcaggtcgctggacagcattgcacagaatagccagaatgtttcgcaatccagccaaggcagttcccaccatggttcatcaccgcctcgacctgtacgacccctgccgggttcgcgacgccgccgccatccctcgctcgatagtggccgtgggcgcctcgagtacctccgagcgctgggaacatacccctcaccaccatcaacacgggcagttgatctacaccttgcgcggcgtggtgcattgtgtgatcgaggcgggtatctggatcgtgccgccgcaatgcgcgttgtggattcccggcggggtgacccacgcggcccgtggcgctggcgaagcggacgtgtattgcctgttgatcaacccggacgccgcccgcgccctgccccggcaatgctgcacactgtcggtgtcgccattgctgcatgagttgatcggcaaggcggtgagtttcccgcagctctacgacgaagacggcgcccagggccggctggtggcgacattactcgatgagttggcccaggcccccatcgaagccctgcatctgccgatgccccaagacccgcgcttgcatcggctggccaacagcctattggccaaccccggcgacaaatccaccttgggcgaatgggccgtgcgcatcggcatgagcgaacgcagcatgacccgcctgttgctggaagagatcggcctgagcttcggtcgctggcgccggcagttgcatgtaatcctttcactgcagcgcctggccaacggcgaaagtgtgcagagcgtggcgctggacctgggttatgaaaatgccagcgggtttatcaccatgttccgcaaggccatgggccaaccgccggcgcgttacctggcggaccgaacgggtgcgccgagccaggcagcacaacccagcattgcgatgcgcgaggttattgactaaatgcaatttactgataaaggaagagactcatgattttttattttaataattaggttagaaccaatcggcattttacagccgtgcccgtgccctctattttccccctacgaaccgaccccttgcccggtggaggcttgtttacccacctcgacaaggacctgaccatgagcattgaattcattggctatatcggcggccaccacgcctcggaaatccacccgcgcagcggccctaccctgcaaccggattacgtcgaaaccgtggcgcgcgcccacgaagcggcggggttcgaccgcgcactggtggcattccattccaacagcccggacagcacgctgatcgcggcccatgccgccagcgtcactacccagttgcagtttctgatcgcccatcgcccaggttttgtccaacccaccttggctgcacgccagttcgccaccctggatgtgttcaacggtggtcgtaccgccgtgcacatcatcaccggtggcgacgaccgcgaactgcgcgccgacggtagccatatcggcaaggacgaacgctacgcgcgcaccgatgagtacttgagcgtcgtgcgtcaggaatggacccgtgagcagccgttcgacttcaccggcacttattatcaggtggaaggcgcccactccacggtgaagtcgccacaacagccgcatatcccgctgtatttcggcggttcttcagcggcggcgattgcggtggccggcaagcacgcggatgtctatgcgctgtggggcgaaacctatgagcaggtgcgcgaggtggtgactcaggtgcgcgccgaagcggccaggcatgggcgtacgattcgcttcagtttgtcgttgcgaccgatcctcgccgcgaccgaagaattggcgtggcagcgtgccgagcaaatcttgcaacaagccacggcattggccgaaaaggctggttttgtgcgccgcgaaccgccaaatgaaggctcgcgacgcttgctggcggcggcggcgcaaggttcacggttggataaacgcttgtggaccgcgattgccgggttgctcggagcgcaaggcaactccacagcattggtgggcacgccggaacaagtcgcagaggcgctgttggactattacgacctggggattaccacgttcctgattcgtgggtttgacccgctcaatgatgcgattgactacggcaagatattgattcccctcactcgtcagctggtcgccgaacgggaacgggctcaacaagtggcttgatagtacagaacaacgatggttcccacgcgagcgtgggaaccatccataagcgactcagttcttgtagtcggtatcggtacgctcaagctggcgcaccagcgcattccaatgccgcgccacgcccggtccttcgccattgctgaataccttggcttgctgttcaacctttgtcaccacctctgcgggtgggaagatcaactcggcattccccgctgcctgtgccgcaatctggatgttgcaggcccgctccaggctttgtagttgctggaaggcatgctcgacgctgacgccgcccgtcaacaagccgtggttacgcaggatcatcacactcttgtcgcccagatccgccaccagccgttcacgctcatccaggtccagggccacgccctcgtagccgtggtaagccacacgacccgagaacgcgatagagtgctgtgagatcggcaacaacccctgcttctgggccgacaccgctataccgtcgcgggtgtgggtgtgtagcaccgcttgcaagtcatggcgcgcgccgtggatggcgctatggatcacatagccggcgtagttgatgcccaggccggtggggtcatcgacgatagtgccgtccagatccactttgaccaggttggaggcgctgatttcgtcgaacaacagcccaaaagcattgatcaggaaatgcgcctcgggccctggcacccgggccgagaaatgcgtgtagatatgatcagtccacttgtacaacgccgccagtcggtaggctgcggccagcttgacccgcacctcccactcttgcggtgtgacccgctggcgcacattgctcaagacactggaaatcggcgtgacgctgctcatggcaaatcttcctggatggcctaaagggactccaagcaagactaggggatggtcataaataataaaaagcacattttaatctaagctaattattatatttatttataaaaaagcagcagtggcagctttcaggccgccacgggagcaagcgccctcgccaccgatcaactcagcaggttcaacgcccgttgttgagcttctcattgattgcatccgtttgccgttcaatgtccttgatcgaggtcggcgtcacgactttgtcgatggtttcggtcttgggattggctggttcaagcgtctgccctttggtggcctcggcattacctttttgcgcgtcttcagagctgatggggtcgggggttttatcggtagtcttatgaacggtcatagtgcaatcctcctggcaatggcgagccgctgagatgacggccctgtgcagcagaaccctgcgaatccggattggttcaagtcaattgcctcgcctcaccactgggcaaaaaagcgcaaaaaaatttaaaccttttacccacctctcgattcaacagtcaggtaacggcatcccgccatttccaaggagagacaccatgaaaactcgactgatgaaaccgatgggccttaccttcatgctgattgctggctcgatgtccaccgcaatggcggcgacctccaacgactttgtcgacaacgccgcacagggcggcatcaccgaggtggaagcgggcaagctggccctggaaaaaagcagctcggcggacgtaaaaaccttcgccgagcatatggtcaccgaccacaccaaagccaatcaggaactgatggccctggcgaaaaaactcgatatcgaagtacccgatgacgctgcgctcaccgacaaggcgaaaaaagccatcctggaaatgcgcgatgaatccttcgacaaggcctacgccaacaaccaggtggtggcccatgaaaaaaccgtcgaactgttcaagaaagaagcggcctcctcggacaatcccgagctgaaagccttcgccaccaagaccctgcccacccttgaagcccacctgaaaatggccaaggaactgcaaaccaaatacgcccattaatcgatccatgaccccaggagacactcgaccatgagctcgcaactcaacggcaagcacatcctcgtcatcacctccaacaccggtatcgagcgcgacgaactgctcaagccgctggagacgctgcgtggctacggcgcgaccgtgacgcacgcctccagcaaagggggcactacccagacatttgtcggcgacacggaaaaagaccagaccgtggaatccgacgtgcaactgtcggatgttgtcagcgccgacttcgatgcgctggtcatcccgggcggcacggtcaatgccgatacgctgcgccaggatgccgccgcgttgcgcttgatcaatgagttcgtgcaggccggcaagaccatcgcggcaatctgtcacgggccatggaccctgatcgacgctggcgtggtcaagggcaaaaccctgactgcctataaaagcgtgcgcatcgaccttgaaaacgccggcgctgccggcgtggtggatgccgaggttaaagagtgccaggccaatggctggaccttgatcacctcgcgcacgccggacgatctaccggcgttcaatgaggcgattgccaaggccgtcggcggctgatcggttgaccgcaatgaaaacaggcgcccgatgggcgcctgttttttatcactcaccgcttcagcttttacgctgctgcgccatctcacgcttgggcccgaacattgcccacgcaatcaaccccagcagcggcacgaacaccagcaccaccacccacaaccccttggtctcccatccgccagtgctgcgcaaaacgatattgatcgcccagagttccaagagcagcagaaccaccgccaatacgatccagatatattcaatttgcatgattcacctcctgaagtctaagcgttaggtcaagcagatgccccaagggttccattagaattttcctggccacactttatggccgcccgttgcgctggagcgtcagcaacccgttgtgcgttgtgcaatctcaacccggcccgaccatgcaagctgcacgacctccaagcacacagaaaaatacaaccaactgatttataagataatttttaacaataaaagttggtacgcctgatgcaaccttcctcaccacgaggcgtgcacttcgacacgcccgcatcccccccgtgaggttacctatgaacgccatcgacctgctcaaagccgaccatgaacgcgtcaagaccctgctgacccagttaagcgaatccactgaacgcggggtaaaaaagcgtaccgagttgttggccaaactcgaaatggagatcaccctgcatacccaactcgaagaagagatcctctaccccgcgttcagaaaagccgggggcaaggaacaggacatcatgtaccacgaagccaaggaagagcaccgcaccgtcgactcgctggtactgccggacttgaaaaaaaccgacccctcgtccaccgagttttccggtcgcgtcaaagtggtcaaggagttgcttgagcaccatatcgaagaagaagaaaccgagatgttccctcaggccaagaaactgctgggtaaagcgctgctcgaagagctgggggccgagatggaagcgatgaaggccgcgcacaaaaaagccatggcgaaaaaaccgctggccgcgtaacggctacctcctcgccgcaaggttcgcgcgacagtgacccacaggcactgtcgcgctatcgatctacaccgatgatttctcctcgctcactcagcgatccggccgaccgagccggcctggcgccccatgctagcgtgccatggccctcggcagtggccgcgggctttcaggagattcatcacaatggacgcgcgttcccccacctatacccacctgttcaaagaggactggcacctgctgtgttcggcctcttccatggcggcaatcgactccccgatcgcctacctgaaggcgttatacctgtttgcccaagcgctggaaaaaagcggtaaaggcatacagcccaaggtcaccctcgaccagcgtcgccccgaactcaagacactgcccctggacgaacgtagcctcagcgctgtgattcctcaactctcgatgatcaacgaaaccctgtcgcgccagatcgacgctcacctcaaacaaacccgccgtgaataccgcggccgttcccttgatgaggtgcttggcaagcaacggttccccttcgtgctgccgttcgaacgtgcgcatcgccagtgctggctcggtttgtccggcggcaagctacagctgggcgaactcagttaccgcatcagcctcaagctgcccaccagccagcgtgcgcaaaacacttacggcgtggtcaggcacgaggcctatgaagcgcaacgtttgctgtccgggctgagccctgcccagcaggtgttattgacggagcctttgttaataagaacgggagacgtacaggcagaagatttttttacccagcactatggtacccaggagcagccccttgaggagttgtcccactggttgcagaaaaccggactcaccgccgatcagaccgaagcgctactggcctgcggcaagtatgtgccggtgctgtcgagcaatgttctggcaagcgccctgccaacgccgccggccaagctgcgcctgcacaacggtgccgcgtacgtgaacgggccgatcaccgaggccggcgcgacccagtcgtccctgtcgatcactacacaggacaagggtggtgcgcgcctgctcaatacctcatgggaacgttaccagcgcctgcaccgaatgatccgcctgcaacgctggacgcaattgcccttcgacgcactcgacgccctgtcgacgagcgtggtgcggcgtgaacacgagggcgacccggcgcggcccgccaacgacaataccctgcgcgcactgggcgtctatcgctatctggaacgccgctacagcctgtcattgcaagcctttgccgccgtgctggatgagataccggtgtgggcacccggtactcgcctgtcgctgtacgaccagctgttcaaccccggcccgttgcctggccaggcattgacgctggacaggccgaccctggccttgagggaggaaatccccacaacgctccgccaccagctctgcaccggcctgcacctgagcgacaccccggcctcgttgcactggctgatcaagcaggcccgcctgcatctgcccgctgcttgcccgacgcttacattttatagcgcgctatatcgccaagcccggatcgcgcagttgttcgggctgtcagtgctcgacagctaccatgtggcggcgctgctgggcggtaaggattacaccggccaactggtcaacccgagcctgcgtcgctcgggcgtgaatgcacccgccgacctgctcgatgtgctgatgcaaatggactggctggtcacctggctcaatgacactgggcaaacggttgatcagcttcgccgtcaattgctcttggacgcccaatccccgccgcccccagtgcaggcgtacatcacgcaactcgatgacatggtcgagctgacccgacatggcctgctggcgcaagaagacctcgctgacctgtcattgccccagcccgaggccgataccaaggccgcgcccattgcctggcatgccctcatcgtacaagggctgctgcacagccaaccgctgctcaagcctgcgccgcccaaagagctgcccaatgggctggtgcagcttatcgaaacccaccccctgagcctggacccagaacacaacgcggttctgcacaacgacgccaaacaagcagtggccaagaagctgggcgcgttctaccaacaaatgcagccgttgaaagagaaaatcgacacgctgctcagtgacccggtgcaccttgccggcgacccggcagcgcacctgcaatggcgcaaactcgtggtccgccagattgcccgcactgccactgccgaatccactacggagctgcacaaaaatgtgctgctgagcctgccggatgccgaagcgtcattggggctggcggtgagccgtgaggccctgcaggcgtttgtgctccatccgcactggctgagcccggaccacacaccggcctcgttgctcaagctgacgctgaacacgctgtacctgctgcaacgctttgcccattgcctcaacacctacgggctggcacaggacagcgtgctcgcctacttgcagtgcgccaattcatcctccgataaaggctccaccttgactgacgatggagcatgcaccgcgcaactggccgcgttgctgcagtgggatgtcgatgaaatcaacctgctcgttgaatacctgcctgccaagcaggtgaagaccctggccgacctggactggctcctgcgttgccatgaagccgtcaggctcaccgggctctctgccagggccttgctcaaggcgaccgacttgcatgccaccttgatgaatgaagactggcaacacgtcggctccgcattgttcgccgcagcgccataaccccgttgtatttcgaccggttcaaggaatgaccatgtctgacaccctcacgcaacacctcaacgaacacctgcgcgatgcgatgctggggttctacctcaatagcgtactgcctgaagacacggctgtagccgacaccgtcaagaccgtcgacgatgtctatgcctactggctgctcgaccctcaagtcagccatacggtacccaccacccgtatcgccagtgcaattgccagcgtgcagcagtacatcaacggcatttacctgggcctggagcctggctacgacggacagggcatgagcgttgacgaacagaccgagtggcaggaccagttgcagtcctattcgctgtggcgtgcgcaccagcaactccagcactacccggcaagctttctgagccccaccttgcgtcatgataaaagcgacaacttcaggcaactggaaaaccagctcaatcaatttcgtatcgagcctgcaccgctgcacaccgccgtccacggttacttaagcggcttcgaaacgctcgccaacatcaagaccctcaatggctatatagacggtgataaagacagcttcgccagcagtacttattacttcaccggcaagtccagctcggaaaacacctattactggcgcacgctgaagatggcctcgggcgacgcggccaccccggcagcctggtccggttggcaaatgctgccgctgtcgattgacgataacgtccccgagcagacgattcgtccggtggtgttcaatgggcgcctcttcgtggtgtgggctcaatgcatcaaccccacatcgtcgtcgagagatatcaccccgattggacgaggcgatgtcgaatcggagaaggaataccagcaacggctggaaacccggataaagacgacctatctacagttgcgcttgtacttttcctataaaaaactggatgacagttggagcgtgccgcaggcctgcattcaggaatacagcctggcacagggcctggacgaattgagctcggaagacctgatgagcgccacggcgtccatcgccgtactcgattcaaaaagccaaccgccgtcactgttcctgggcctgagcgcacagccgaaccatcaaacggcttcctcgcacaacggcctgcatcggcatttctttcaagcggtgcggctggatcaacacttcaacgttcattggcttgaaaccctgggcagcacgcggcggatgttctcctggcataaagagtcggaactggccgggcgctacctggccctgttcgggcaccacaacagggccagatttcagttcagggcgcccgaaacggtccaggtcaaagtcgataccctggacaaccaaacgccccatcacaccaccaatggctggaattacgaagaccatcagcagcatatccgcagtctttcggctgaaagcgatatccggttcgaccgcacgacgtcagtgctggaggtcaccacccgcctggaaaaacgcttcgagccgcaccgcactgtcaggttcagcaaggcagatgcactggtcaatttgaccatcacactcagcaccagcgggcctgcccaaaacgcgacgctggctttaggccccaccgctgaaatatttctggagggcgccaagctggcaaccttctccaacgtgcgtatcgacttgaccctcaagtgcaatgagaccggggtcagctatgcccacttcataaaaaatgcagcgaatcagccggcgacctttaccctgccgcagattggaaaagatgaagaaaacccgaaaagcacgacattcaatctgcgcgacaaacgcatcagcgaggaagccttcgactattttttcaacaccccggacgcgacctacaccgctaccctgtcgttctacaaccaccaggcggagtccaacagccacgcctacgatctgttgctagacaaggtccaggttcaacagaaacaacgcctgtacaaacccgtattgatgtatccgaagcagggacaaagcgccttaccagaaagcccccaccgcaataacacggtactcgtcggcctggcagacgcctcccggcgcaccctgcgcgacaccttcaccgaactgtccgagacgcacacacttgaagcgcagatagaactctcccccaagaccttgcacccctaccacgaggatctcactagcacgacggtttcctcattgacgctgattcacggcgtattgctgctggagagcgatgtgcactaccccgaccccatcatcctgggctacgcgttgaaaaccgcgaccttcaccctgccgcccaataacagcaccccgatcattccactggctccgtttatccggcgactcgctaccccgccctatggcacggcagagttcatcgacttcaacgggtccaccatcgagtctcttgataagcctgaaaacaaacgagcgcccatacgcaccaacacctgcgtggcggggctcctggcaaaaaccgctggcgcaggtttgcagcagctgttcgccttggcgccggatgcctggcgcgagccgccattgccggacgaaaaagacaccagctcactggacttccagggcccttatggcgtgtattactgggagttgtttctctacctgccctggctgttggcgcaacgcctgaaccaggaacagcaatacgccgaggccgaaacgtggatacgctacgtgttcgatcccgtccacccatctgacgtttggcgcctgcccgcgctgcttgccagtacgccacaagggcaccgcgcctcttccttgtcccatccattggcgaaaagcagtgcagtacattttcgccaggcgctgtatctgttgtacgtcgacattctgctcaatcgcggggatgcggcctaccggcaactgacccgtgacagcctggccgaagccaaattgtggtacatccgcgccaagggtttgctcgggccaagaccgccactcaacccggtagatccttgggcaaccacgaccctggacaaactgcaaaacccttccaccctcgacagcaaggcagtgcctgcgaacacctcgcggctgtgtcggtccctgagcccagacttgctgctgcgttgggacaaaatcgaatctcgcctgcacaacctgcgccatcatctggacctgaccggcaagcccttgagcctgccgctgtacaccgccacgctgtcgccgcaaacgctgctcgctgcctaccagcaaggatctgccggcgtcagcctgcgtccgtcgctgcgcaccgctcaggccgcgcactatcgcttccaggtactgctggggcacgcgttgcaggcagtcgacaaccttatccaattggggacgaccttgttgtcattgttcgaacgcaaggagcaggcccagtacctggaaacccagcaacagcaagcctgggacttggccaggctggccgtcgagcaacaggcccaggccgtgcagttcgatgcgaggaacaaagaggcgctgttggcagggcgcagcattgtccaagcgcgggtagccttctttgaacagcaactcaaacgtggcatcagcccggccgaagcgcaggccacccaggagtaccaggacagtgcgcgctgggacaccgccgccgccgtggcacaagccggcgcgggcctggccatgctgataccgaacattttcggcacctccaacggcggcgtgcgctacgagggcgcttttcacgcgctgcacgcggcgtcccaaggcattgccaatgaaaaacgcgccaacgcagcccacctggaccgcgccgacctgttcgcccggcgcgccaccgagtgggcccatacgctggagcaggcacgccttgaactggcccaggtcgacgcccaactgcaggcttacaccgagcaggaagcccatacccgcttgcaactgggcctggcccaggccagcttcacccaagcacgaaccctgtacgaccagctcggcaaacgcttcaccaacgcccagttgtatcaatggctcaacggccagttgtcgaccttctactaccaggcctatgactcgacgctgtcactgtgcctggcggccgaagcctgctggcaggaagagcgcgcgcagtgggacaagcacttcattcaaacccagccctggacccatcaataccgaggtttgagtgccggcgaagcgctcaagcacaacctgctgagcatgagcagcgcctacctcacccacaacgaacgtttgctggagatcactaaaaccgtgtcgttgcgccatctgcacagcaaagaccctgtggcgacgcgcgacaagccctgggccacgcttaaagctgacctggtgaaaactggcaccttgacctttgaactgaccctcaagctgttcgacgacgattaccccggccactatctgcggcgcgtcaagcacctcagcgtgtccctgcctgccacgttggggccttatgaagatatcaaggccatcctcacccagaccaccaacaccacgcacctcacccctgcggccaaacacaccgaagctgcggtaaaaaaagacctgcgcgccaagcagcaaatcgccctgtccagcgggctcaacgacagcggattgttcaccttgaacttcgacagtgacgagcgttacctgccgttcgaatacaccggggccatctccgcctggcaactgacctttcccaaccacacccggcaaaacgccctgctcgaatccctcaccgatatcatcgtgcacctgcgctacaccgctaaaaacaccggaggtcaacgatgagcgtgcagccgcccgacctcctggaaccgaagattcctgcgctgcccaagggcggtggcgccatccagggccccagcgcgcaatggggcgccgtgggcacacggggcgaagcgtgcctggaggtgcccttgccggtttcgccgggccgtggcttcacgcctgcattgagcctgggttatcgcagttcccagggcaacgggcccttcggactcggctgggcggtgtcggcaggcgccatcagccgtgatacccgcaagggcgtaccggcctacggtgatgacgaccgtttcaccagcccccaaggtatcgacatgatccctgagcgtgatgccgacggcgcaattcgggccacaacctgggaccactataacggcctggccctggatgaaccccaccgggtggtgcgctattttccggtgatagaagcgcacttcgaccgtatcgagcattggtccacccccagcgacaaggccggattctggctggttcagggtgcggacggctgcgtgcacctgttcggcaagacgcagatcgcgcgctgtgcggacccgaacaacagcccacgtgtagcccaatggctgttgcaggaaagcttcaacccgctgggtgagcagatctattaccactacaaacgcgacgaccagccgccaagcgccgccagggactatcgcgcccagcgttatctggcgcgggtgtgctatggcaacctcaagccccttgagcacctggcgctgtggcgcgcggacgccctcgctgacaagcaatggcacttcgaactgctgctggattatggcgaacgccacactggcctgagccaagtgccgacctatgccgaacaacacgcctggccggtccgcaacgacccgatcagcagttatgcctatggctttgagctcggcacccggcggctgtgccaacaagtgctgatgtttcattacttccccgacgagccgagcctgggcgccgagccggtgctgacgcggcgcatgttgctggagtacaccgatcgccacgccatcggcagttgcctgttcgccgtgcacaaccaggcctatgacgcccaaggcaccgccagtgcctggccgcccttggaactggcctacagcgtcttcgggccgacactggaaaccgcgcactaccaaacgttcgacgccatggcgggcatcaacgacgggcagcattaccagctggtcgacctgtaccgcgacggcttgccgggcatcctgcaccgcaccgataaaagctggtactaccgcgagccgctgagggcccccggcccagctgacagcaatgcgctggcgtatgggccctggcaggcgttgccacgcattcccctcgctgatagcacccaggccacgcgccaggcgctggcggatcttaacggcgatgggcatctggaatgggtggtggcgcaaccggggctgagcggctttttcagcctcgactcgcagcggcaatggtcggggtttgtgccttttgcggcgatgccccaggagtttttccacccccacgggcaactggccgacctgatgggcagcggcaggctggacctggccctgatcggcagccgcagcgtgcgcctgtatgcgcagcgccaggacggaggctttgatcctggccaggacgtgcgccatgggcccgacgatgacgggctaccaaccctcagccatacgccgacagagctgatcgctttttgcgacccgctcggcagcggtcaacaacacctggtacgcattcgccataacgaactcaagtgctggcccaacctcgggcgtggtcgcttcggcaaggggtttgtattcgccccactggcgttcgaccctgccaccttcgatgccgccaacattcgcctcgccgacctggatggatcaggcgccgtggacctgatttacctggcacccgaccacttacaggtctacatgaaccgcgccggcaacgggttgacatcggcaccgatgacgctgcgctggcccgaggggatgcgccatgacgctacgtgccaggtcagcttcgccgaccttcaaggcctgggctgttccagtctgatcctgagtgtgccgcacatccgaccgcagcattggcgctatgactttgtcagcgtcaaaccgtatctgttaacagccaccctgaacaacatgggagcggccacccaattgcgctaccgcagcagcgcccaggaatggctcgatgagaaacaccactggcagacactgggaatggcccaggacagtagccttgcgttccccctgccagtggtcaaacggcaacggcaaaaggacctggtcagtggcaaccactcgacccaatacttttgttaccgcgaagccagctatgaccgtgacgagcgccagttcatcggcttcggcctggtgctgcaaaccgctcagccacctaatacccacgcaccgtcaggcgtgttgaccaagcgctggttcaacacgctggccccaccgcgcgaagcgttttacgcggctgacccgcaggcccccacgctcggcccgtccctgctgagccaactggaagccggccacacacgcgacacgctgatcgccacacccggtgcctcgaccttgcgcgccatgcagcgtgcgctggcgggtagcctactgcgcgaagaggtgtatgccgccgccgatgtgccgcagcaggcagtgccatactcagtgcagcaacagcgctatctggtgcgccaagtgaagccttcgcccaaggccggcgagccggccgttctgctgccgttgctggtggaatcgatgacctgtcgttacgagcgccaaaaggatgacccttgctgccagcacaccctgaatctgcgctgggaccgctacgcgagtaatttgcagcaagtggtggtcgattatgcccgccgcaagactgccggcgactctgcgccagcggcgctggcccacgagcagcagtggtggcgcgacgcgcacgacccggcgcagcaggcttattacctgagcgaaacctgcgccgagttcatccacttggatgccgcgcagcgctggcgcttgcggctgccctaccagcaacgcaataacgcgctggtgctgagcaaagaggcgttatcgggtagcaccatcagctatgagcactttgtcgccgagggctcgtccaacccgctggggccggatgcccaacgccaactgggcgggctgtggaggcagcattattgcctggccgaacacactgcccccttaccgcccggaaccgcgaactttcaggccctgctcgcttacgtcgaaacagccgaactcgatcaacaggccctggatgtgtatcaggacagcgctatcactgccacgctgaccgaacagcactatcggcccctgaccgcgttcctgtcgcccgccgctgggcgtgacgaggccatcaccctgtggtcgctcggccagggttacacccggtatggccaagccgacaccttctaccggcctcgtcgtcatcaggcgagtctgagccacgggttcacgcacactgaatacgatgcctatgggctgcacgttatcaaggtgcaatcggccgacggctgctcgacccaggcacagtacgactatcgtttgggcttgccggtgctggtgaccgatgcgcagcgtacccagcggtatgcacactacgatgcccacgggcatttgctggcgaccggcctcaagggcgaagagcagagcaaacctgtcggccatgacactcgccagtccttcacccgcgcgctcgactacgggccgacgcaggcgctggccgatccgcagacagccttgctcaacgcccagagtgcgtgcgtctacgatgtgttcagttggatgggacaaatcccgtccgccagtctccaggcagcctgggtcagcagcgcttacctgctgcccagcgggcatattcgcgcctcggcctgggtgcggctcaacagcctgaccgacccgcaggcccatcatcaaaccctcaaacgcctgattcgggcgaccaggcaagtgcccgtgcatgccgtggtgctgcatgccgaccgctggcaaggaacctcgcaggaccggcagacccatgtcgccctggccttcaacgacggttttggccgagtgcggcaaacccaggaaaaagctgcgccgggaccagcctttcaggtcgaagacagcggtctattgcgcgcaggcgccgagcaaacagactcagcgaaccgttggcggatcagtggccgggtggagtacgacaaccagggtggcctggcgcggacctggcgaccttacttcgccgaccgtgccggctatatcgacgatgcggccttcaataccgcgcgccccagcgagcaacacttttatgacgccttgggacgcccggtgcgcgtgctcactgccaatggcgacacacggcgtcagacttactgggcctggtacagcatcgctgaggacgagaacgacactcgcgcgccaacctgacaacagagccgggccgttacacagcccgagctcctgcgactgacgttgcgcgcattaacggcggtgagggttcatcaccctgaccgcccgataattgagcccgctggtgtgctggatcatcactcgataggcgccacgaccgcgctgcccgcgatagcccggcaagtcaaaactacggacattctgcccgcccgccatggcatgcccggtatgaaagtccagggtgcgggcttccaggcggttgatcacgttcctgagaatcccaccgccagggccgcgtaattcattgagaacagactcaacgtcaatcaccagccgctcaggctccagcccggaggaaggtcctgggcttaccggttgcgcggcgggctcctcagaagcggagcctcggcggcccacgctcgtgaccctggtttgcggttgtacttcggtgtgggtcagcccagccgctggaagcgggctggcgcccaccttgcgtgccggggcgcgaagctccatgcctaaaaaacccaatctggccaaggtaaaatggggattgttttccgtgtgggaggctatgtcggccctgtccttgtgcttggttgggccaatgtagccatatagcccgccacgtgcgcctggggtcaacccataagcgagactttcagtgtcaggagtagacagccggtgttgcagataaaagtccgccagctcagcgacttcctcttcactggcgccatgtacgccccccagagtctgtgcatactcctgggaggcttgctgataaaacgctttgcgtcgagcacgcaggctgacttgctctctgtactgacgatagccaagcgccgtcacgcccagaatgcccagcgcaaaacccaggacagccaactgaacgcgctggcgtgcgtccatctgcgccgcataccctgccaacaccagcgtaacgataagagtggcaatatcgatgatgggatgccgctgcaagccgtcgtcgtctaaataacccatggggttgtttcccaccatcgcatacaggttcaacccatccacatcccctgccgggtctgcgctgatccaccgtaacaaccacggtgcgtagtacctgaaaccgtagtaatacaacccactggcgtcgcgctccttgcccgaataacgccgggttttgtagcccgcttccaatgcattttttgctgcccaccaggctgttgcgccgaacgggtaataattctcctgactcaaaagagcggctttctcgtccaactccagggtactgctgcccaaatggtcgtcgaggctgaagcgcagttgctcatccggcattgcctcgggacgctgccgttcccactgtaaccctctgaccgaatggcgcccaccctgagcgagcaacacattcaaccactcgccatccggcccgtggcgatgcagctccagccctggcagataaagcacttcatgggtgtgagtctgcgtcttgccatgtgccacgcgacgcttgatgactcgctggccggcgccgtcgtacagatacacttcatcgtcatgttcgccattgtcacgcagcacctgcgcgacgcggaccaactggttgcgcccattccaggtcaacgcctgcccaggcgtcaaagccataagattgccgccctggtcaaagccatcgcccaggcccggcgcctttgcgccctcgcgggccatcacgctgtgattactgtgttcgcccacctgcatccgttgggtataaccgctgccgatgctgggcacatggcgcatctgcgtcaggttagcagccgagtcgtaggcataatggcgtgtgtagttgccccagaggttgtcgtctgtggcgccgaacgtgactcgccccggcaatgcgaatgtgccggtattgcgcgcgttttcacggccggtggctttgatcaagcgcgacaggctgtcgtactcgaatgtgcttactgcctccacctgcgcgttgctggcccagcgggtcggctgcgccgcatcgcggatgcgcaacacattgccgacccggtcgtagctgtagaagaggtcttgtagtcgcttgcctgccgaatccttgaggtgggcgctcaagcgtgtcaaacgtccatcagtgtccgaatactcggcaacgctgagcacgccattacccaagcgttcgctcaacacctggcccgaggcgttgacgctgcgttgatccaccagggtcttgcgcgctccgcttttgaacaggatctcgcttttcgtcaactggccgtcgacaccgtattgagattgctggcgattgccgcgcgcgtcgacctgctccaggcgttgccccagcgcatcgtgctgccaggtggtgatgaaggtttcggcttgcaactgcgcatcccgctcactcacgggcagcggccaatcgggcgtggtgtgcgacttgcacaggcgccgggtttgctcggtgaggttgccttgcacgtcgtagcgctcaacgagcaacgtgcctgccgagtcatcgtgacgaatcaggcgcccacagcgattgcgcgccgcctccgtggacgtcatgcccgcgtaactcatgcgctcgacacagcgttcagacgccgccgcctccgcgcgctcgaataccgcgacggggcgcagcaacgggtcgtattcgaaccgctggcgcgtgcctcgactgtcccactgttgcacgacctggccgccactgccgagcaagcgcgtccgacggcccgcatccacgctgtcggtgctcagcacttgcccgcccaagctataacgatgagacagattgggcggcacgtcgggatcggcagcgtgcaactcaaacagcctggggtcccactgttgctgcaacaggccgcgagcgtcgaacacctgccgcgtgacctgcgcgctgggtgattgctgcgcggtattgcgatggtacgccacgctgcgcacggtcaaccctcgcgggtcgaccaccgtcagcgtgggcgtgttgtgatgcaaagaagacataagctgatgacctgaaaaaccaaagaagcctagagcctagtcatcagctcgatgccagcctgcgggccgcgcacgctgcgccgtgtgcggcgcttccgagggtgtcgtgaggcttaccgggcgcggtgcatcagggcaccggccgccagccgccgaacgcgccttgcgcatccaaggggcaccaggcgaaatcccatgcgggtaccggcaatgcttgctgctgtgcggctatcgaaacgctgcctttgcaatcgaacagcgtcgaatccccccagctcaggacgatgcccgccgccgcgctgtcgtccgtcagcacccaacgcgcagccgcggcggccatgaaggcttcgatcggttcctcatcgatctgcgtgcgatacgccgaactcagtaaccagcggcatacgttcagatggtaggtccagtccagcggcggttggttgtgataggcccaggtcatgaaggcgcgaaacaggttcaagccctccggtgggtcgagcctgagcagcgccgggcagatgtcgaacaaggtatgccagtgaggcagcaggcgtgcatccaggtgcacgaaacagcgcgaattgctcgggtagtcaggcagcgccggctgcgcacgcaggcgccgcgacgccttgctgaccaggcggctggcgccggcaggcaattgagggttcataaaacgtactcaccatcgtgacgagagaatgcctcctggtgacaggaagcccaaggcacacgtcaggatgcgggagaagcgcgagggttggccgaaggccaggaataacgcggaggcgctttgttgcgccgctcatgggcgacacgtggggtttgcgtaagaccgagcagccaggccaggccgatgaggaacacgagggcgacggtaaccgcgttacacaccgggcaggcaaagtagttcgagatgttgctgaaagacgggttcgccaaccctttgtcggaaatgggcgactggccgccgtccaccgaacagaacagcccgccgatgccgttgagctgctggcccatcatctggccatgccccaaaccgcaggcgaacaggttcatcagcacgcagaagtacagggcccaggcgatcagtgagcggtcagagtggcgcaatttcatggcggcgactctaccaccgaagccacaaaaggacgaaatgggccacacccctgtggcagaacgtcgcagattacgcgcacgggccagggttgttagactctgcacccttctcgttactccttttcaaagcctggtggggcagctctactgccttgcaggcgtttcacaggatgcacagttgatgagtacgttattcacccgccgcaaagtgctgaccggcatgggcctgttgggcctgggcagcctgctgggcggctgtgactacagccccaagctgaacttcaagtacggcaaggacctcagtgacaagatcatgggtcgcaccttcaagctcaagaacaccgacggcgaaaccgtcaccttgagctcgtaccgcggcctcatgccggtggtgttcttcggcttcacccagtgcccggcggtctgcccgaccgccctggcccgcgccgcccaagccaagaaactgatgggccgcgatggcaagatcatgcaggtggtgtttatcaccctggaccccgagcgcgacactcccgagattctcaacaattacgtcaaggccttcgaccccagtttcgaagcgctctacggcaccccggaagaaatcgccgtggccgccaaggagttcgggatcttttatgaaaagatccccgccggcgacacctacaccctctcccacaccgccaccagtttcgtgttcgacacccgtggcaacctgcgccttggcttgcaggcatcccttaccgctcaagagtgcgcagaagacctgctcaccgtcatggaggtctgctaatgactgccgttcaacacctcaagcgtctcaccctcggcctcaccctgctgggcctcgccgcacacgccagcgcccaagtacaagtgaccgacgcctgggttcgcgcctccgtaccgggtcagccatccagcggtgccttcatgaccctcaccgccgacagcgacagcaaactgctgagcgtcgcttcgccagtggccaaggacgtgcagattcatgagatgagcatgaaggacgacgtgatgcgcatgggcccggtggatgcggtggccctgccagcaggaaaagccgtcaagctcgacccgaacggctaccacgtgatgctgatgggcctgaccgcccagatcaaggaaggcgacgaggtgccgctgaccctgacggtgcaagataccaagggtgaaaagcaggctgtcgaagtgaaggcaacggcgcgtggcttggatggcatggaccatagcaagatggaccatagcaagatgcattgagtaggccgctttttctcccacgtcaccacgatgcgaagcgagccgctcttgctcttgatctgcttgtgatcttgatcttaggcgccccgttaaaccacgctggccgaacgcaggcttgaattcgtgggtaacccggcaggacgccgggttagccgccccgcgccatggatggcgcgtggcggcggcccacggattcaagcctgcgttcgggcacaccgagcctaggcgaggtgccgagtggtggggcaagagcgttttgcttactttgccgctcttgcaaagtgagccgccgtcagggcggaaccctaggtggccgttaccgcaggaatggatatgtacacaatccaactgtgttgactgccaggccgtcttcgcaggcaagccagctcccacagttggatcgtggtgcgtcaggtggatatggggcggctggcgggccgttacgggagcaagctccctcgccacgggttcagcgcgctatgctggcgctccaacccacagggacgcgtgcacatgccaatcaacccagccttcatccttcaccagaccgaacactggcaactcaaccaccacctgacctcgaagctgccgggttacctgatgctgagcgccagggcgccgattgacgccctccccgacatgcctgaagccgcactggcagaactgggcggcctgctcgccaacatccagcgggtgatgcaaacccaactccagccgaaatggttgtatatcagccgctacggccatatgcccggcttcccactgcactttcattgcattcccgtttatgactgggtagagcaagccttctggcgggacgagcgctatcgctcgctgaacgctttcggcacccaccccctcgagcccgtgaccgatggtgctgaactgaccctgttcgtatggcgcgaatttggcgagagccccaccccgccgcagatacaagggccaggaatagagcttgtgatcgagcaattgcgcgctgcattcaagcgcgattcataacccgcaactgcttgaccatcggtacacacgccagcaccaacccggacggagagcgatacactgcctgctcatcgcccacatacccgcacgcgctataaaaactcaccgcgttcagtgtcgcatccagcaccacctgctcaatcgcctgctgctgcgccacgtgctccaagtgagcaagcatcgccttgccaaaccctcgcccgctgaatacgggcaatacaaacaaggcgccgagttcatggttggcaagatccagcatgccagtggcaacaggttcgccattgaaccatcccatgtagaactgtttttccatcagcgcgccgtaaccatcactggcgcgacctcgagtccagagcgccattttttcagcgctataagcgccaatacattggcctagaatggcctcgcgacgaatctcaaacgcacgctcggcgtcgtccggcgtggcgcgctttatctccagcatcgcaagctccctccatgacctcaaactgccattagcccatttgtgctaatcgaccctacctcacggcggcgctatattccgcggcacttccaacgttctcacccacaccgcgcattcagtgcgcgcgggttcgttgcgcgttggaaaaaccaaaacaaccccaaggaagaagcaccatgaaactcctctcccctgtcactcgccttgccctgctgggcgccctgatcatcggcgtcgccggttgcagcaatatcaagcctaccgaagaccatctcaagaagctgtcggaaaccaatctgggcgagccggtaaaacgtatctccaatgtgcgcagcgactccatgaccacctactacgtggctaacacggcctccggcgagtacaactgttccgtgcccagtggtgccagcggcggcgcgttcgcgattgccagcttcggcctgatgaagccagcggcctactgcatgcccaagggtgccaaaggcaatggattaacaccattcatgcagtaattttttcctggctgagctcacgcagagtgccgcgcagttccacagggcgtaccggtttggacaggatagcgatctgacggtcatgcaacgcggcctggattttctccacgtcgtgcccggtgaggatcagcgctggcaccgcccagccacgttgctcgcgtagctggtcgatgcattcgataccggtggcgtggttgcccaggtcatagtcggcgacgatgatgtcgcagtcgctgaccaaaccctgccccgtggactcggcctgcacttggcacccccagcgctcgagcagggcctgggtggcgagcagcacgttgtagtcatcttccaccaggcacaccttaaggccggtgagcaggccggcttggcgtgcatcgtcgcgcaacgccggttggcgcggcgcggccgccagggccaagccatgcaagctgacagaagtgccatggccaacgcgcgagcgcaggctcacctgcaaccccatcaattgccccaggcgcttgacgatggacagccccaggcccacgccttcaacgtccttgtcacgcagttgacgcacgcgataaaactcttcgaagacttttgaaagatgctccctggcaatccccctcccctggtcgtgtacctctactaccaagccgttatcgcgcacacgcacgccgatcagcaccggtcgctgcgcgccgtatttgaagcaattggagagcaggttctgcaccatggtcgccagcatgcccggatcgaccaacacccaatgagcgcaggggcgcaagcgcaactccacccccgcccagcgtgcggcctcggcattctggcgcaccaggtcggcgagaaagtcgcccaggtgaatcacttggtatttgggcaacaggcgcccgttgtcgagggtgtagaggtcgagaatcgaacggaacaattgcgacacgttaagcagcgaacggtcgatattgtccaccaagcgctgttcgtcctcccccaagcgggcttcgcgcaggcaggcggtgaacaggccaatggagtggatcggctggcgcaggtcatgactggcctgggcgagaaagcgggatttttccaggttggcggcgatggcttgctcggaggccttgcgcgtgcgctccagcagaatatgcgcatacaccgggatcaccgtgctggtgatcatcagcatcagcaccatgaacggctgcgcctgccacagcggcgtaagctggtacacgatcaacagcgccagcaacgccagcgccgtggcaatcgccagatagcgcgaaccgtagcgcatgccattgcccaggttcacccagaccatcaccgcatacagcggcaacgccgcttcaccacccaccaccaggccgaacgaagtaccggtgtaatcgtggatcatgccgaagatccgccgcgccgggtaatgcccgggccagcgtgcgatcacctggcgaagcacgatggacgccagcaggaacacgaagatatagaggatcaccggcaggtaggtgtccagcgattgcccaggtaggaaacccagtaagcttatatacacaatggcgatggtggccaccacaatgcgcaggttagcctgatcgagttcagagttggtctcaagactcatcgtcatatccctgacctatcatctgtaggagcgagcttgctcgcgaaaaacgttaacgataacgcgtgttgcctgaatgaacgcagcgcctgtgagttcttcgcgagcaagctcgctcctacaggcccggtggtaaattagcatgcctggatacaaccttgccccaggaaggagcacacaatgaccggccgaatcatcatcgccgacgaccaccccatgtttcgcgaaggcatgacgcgcaccgtgcagcgcctgctaccgggcgcggtggtgcaggaggccggcgacctggccacggtgaatgcgttgctgtgcgaagcgggcgaggtcgataccttgattctcgatttgcgctttcccggcctgacctgcatcagccaactggccgaactgcgccagcaactcaaacgcaccaccttggtcctggtgtcgatggtcgacgaccccgcgctgatcgaacaggtcatggccctgggcgccgacggttttatcggcaagaacatcgccccggacgagatcggccaggccctgctggcgatccgcgagggcgaagtgctggtcaagttcgccccttcaggcctgctgcccctcgacacccacaccctcaccccacgtcagcaggaagtgctgcgcctgattgcccagggcaagaccaacaaggaaattgccaaggtcctgaatatctcgccgtttaccgtgcgtatccatgtgtcgtcattgttgcgcagcctgaatgtcccctcacgcgcggcagctgcggtgaagtattccggcgagttctaggcgcctgcgcggctcagcgctgcgtgggaatacgaatatcgcctccacggcattggcttttcacactgcgcgggcaacctgcaaacgccagatccttggtcaggcacacccgcacttccgacagcacctgacccttgcagatcaccgccatcccgtggttgcccatgcgtgggttgctctcgcgaaacagcgcctcgatctctttggcctgcaatgacggcggcgtgttgaacggctgcagttgctgcgggatcaccaccgcaccaagcgccacatcggtcttctccagatactccaacggcggcagcccactgcaggtgccatgcttggcccactcatgcttgagcagtgcacgggtgggaaacagcaccgcgcccttgtccatttctgcctcgctcaagtgcgtctgcggcgtacaggacgccggccaccctccccgcgcgtattgcggccacaaaccgtgcagcacaaagccgtagcccttgcccgagcattgctcattgcctgggtgcgtcaggcaaaacgtgggtgaccacgatagcgacagcacatagaaatcaaactcgcccgactgcccttggctgcgtggcgccgccgttgtcgcggtggcgatcagcagccacaacaccatccagtatttcatcccggtattcctttaaaagagtgaagccttacgctatcgccacgactagggatgctgggagtaacggtgtagcaccttatccaggatgatatcggtcttcagcgcttcgatggccagcgacggatgctcggcctcgccacgaatatgcgcattcatgttcaagacatggtgccattgaatatgggtgtgacacggcacttccaacacttcggtggtctcgccttcaagacgtaacggctggtcctcgaacaccgaaaactgaatacggccgcgactgccgatcagttcgacacggtcttcgcgacggtccgccacaaagttccagcagcccatgcccaacgcaccgctggcgaatgtccaacaggccgtcactgcatcttctgccgcatagcgtccggcctgtcgcgccgaaaagcctgagacctcaacgatatcgccagccaggtactggaacaggtcaaacccatggctggccaggtcggcaaagtagccgccaccggcaatggccgggtcggtgcgccaattggtggcgtcggtgtctgttacggcagcgggtttgcacaaagtccagctcagaaggcgcagctcaccgatacggccttcctgcagccaggtgcgcacttgctggaagcgtggcaatgaacgccggtaataagaaacaaacaggtgcagcccggcgcgctcaaatgtgcgctgcatcaacgcgctctgttcagcattcagcgacatcggcttttcgacgcagcaatgcttgcccgccgccgccaccctcaaggcgtattcaagatggctgtcgggtggagtggcgatgtagaccgcatccacctcggggtcatcgatcaaagcctgggcgtcggtatagcaacgcgcaatgccatggcgcgccgcataatcgcgcaccgcctcggcacgccgccccatcacggcgaccaatgccgaacctggcgctttatagaaagccggtccactctttaactcagtgacactgccacagccgatcatgccccagcgtatggtcttcatctaatgtcctcggtcgtattcgtcaatcgggcagtatccacataccggccctggcgcgccataaccacttagcatgacaattgcattacacttttatgacattcgttcggcgcgggggcacattcgatgaaaattagggcaaccgtcatttgcgaacatgaggggcatattctcttcgtgcgcaaggccagatcaaaatgggcattgcccggcgggaaagtggaagcagacgagcgcccggtaggcgcggcggaacgcgagctggaagaagaaaccgggttaaacgtggacggcttgctgtacctgcaggagctcaaggcccgagacaccgtccaccacgtgtttgaggcatcggtagtcaatatcgacgaggcacggccgtgcaacgagattgtcgattgccagtggtatgcctacaacgccctggatgagctggacaccacagacgccacgcgccacatcgtcaaatccttcctgcggcgcctctgacgcgctggacggcccttaacctaccgcagcaaacccacggcgcccggcctttatctcggtacgcaactcaccaatcaggttggagatggcacggatgctgtccaggccctcgggcgatacacgggtcaacagcaagtcgacacgaccggacgcaggctcgaacacgctgatgcgcagcgagccgtcgctgttaaggcagcactcacacgccagcggcaggaagcctgaggccatgatgcggttgaattcggtgatggaaatcatgatcagcccccccgtccctgggttctacccgattgaggtgatgcaagcagcatagataaggttttgccggccgccggacaattaacgcaaaagtgttagccagccctcactttgtagggcgtcacccgccatgaacgacagaccgagattaaatcgcgggcaaaaaaaatcccaagtagctgatggaaacttgggatttaaaaatgcataaaccgtgggaggtgaacgcccggctatagtagcgattgtaaaaacatgtaacaagattattttaatcctttcgtcggattgaaagcctcgtaagtcattcaataaccacatgttttttaaggtggaaagcagtagtcgtgctactttttggtgcaagtaacgacagtaagcccctgtataaaaaatggttattaatcgggcgtagcgctttcaagtaactgttcacctaactgcttgcatgtttcttgaagggcctcacgactggaagcagtggcgcccaccacggcctccagatgacgacacagcgtcaggcgttcagccgcctcttcgcgctggcggtcgaccttggcgttgagttgaatgaaatagaaccccagcagcacggcgatgcccagcacacccaccgcgaggtagcgcaagccgttggacgatggaggctctggggcattcatggccttatggcgccctgctcttttcataacgaacgtcatcaccatcgaccgggcccacgacggaccagcccaggcgctgatagaacccgttggcccggatttcatcccgcccatcagtcaccaggtacagcgtgtcgtggcgcgcaaacagggccgcctcggccactgccatcagttggcgacccaggccaagcttctcgtgcgatggcagcacgaacatcgcgaatacttcgccttcatccagatcgaccatggaaaaccccgccgcctggccgtccacttccgcgatccagccgcaaggggctgcgcgcaacgtgtcgctcaatacctgtggggtaatccccaggtcagccatctgttcaaggctcaggtggttttgcaccaccgcggtgcgaatcgcgcacagcgtgtcgacgtcatcgggtgtcgccgttcgaatcagcacttgcatatcggcctccatgaagaagtgcgcaattgtatgcaaatactcacacagggtttgtcgtggatttgtaaaggccccacggctggtgcggggctacgattacttgcgcgccaccttgtagcgcaggcaatcctggtaaaagctttgacgaatcgcctcgggcttgagccgtgagcgactgtcataggtctgctcggtgatgcccatggccatcatgcgcatccacgatttgctgaacttgagggtctggatcttctgccgggcggcgtacagcgaaacgccggataacttgagttcctgggccctggcggccgtgcctgcgccccaactgcacatgtacttgtcaccttcgcgcaattccctggcctgcgcgacagtcgcgccgccggccagggagcaggcaatcagcatcattcccacagagcgcatttgcatcctcacctaaccacctgaaaataaaagtgattttggcgaggattttgttacaaaggggccattaaattgccttaatgcgcaacgcaatggccggatggctcatatcaaggcttgagttcgaacagcgccggcattggcggccactcagagggcactttacggaagcggctgaacccggcggcttgcgccatctgacgggcacgcttctcgcccatgaacgcccccagcccggcgccgccatgggacagcgaacaggtcatgcaatagagggtgctctgcgggtacatgacacgcccgaacaggttcatgttttcgtgcagttcttcggacaggttgagttccaccatcaggtaggtaccgtcttcggccgtggcggcgcgcaaatccttgagcatctgttgagggtcggtggcatcgtggatcaccacaaaggtggtcacgaagtcgaattgctggccgcgcaaggcgtcggagtcgttcacctcgaattgcacccggtcacccacaccggccgcctcggcgttggcccgcgccaactcgatggaaggcaggtggaagtcgcagccgacaatgcgcgcctcggggtaggccttggccatggtgatcgccgccaagcccgcgccacagccgaaatccagcacactgccgccggtcttgagcttctcttcgacgccgtccagggacgggatccagtgctggaccaggtagtgcttgtaccagggcatggtcatgcgctccatgcctttccaggtttccagcgggaacgcctcttcggcgcaacccccgccgtggcggaaggcttcaatgaccttgggcgccatgctcacgaacggcacgctcagctggataatgccaccggcgaaatacggcgagtcttcatcggccagcactggcacaaattcagccggcatctggtagcggcgggtttgcgcgtcgtaggtcacgtaattgccagtggccatgctgcccagccattcgcgcaagtaacgtgcgttgtagccggtcttgtgcgctaactcttccagggtcaccgcctggccgtcggccaatgccttgaacaagccgagctggtcgccaatgtagagcatggcgccgcgcagcgtgttgccgtaatcctccatgatgcgcgccgaaaattgctggaccttggctttatcaacttccataacgttggacatctgtcgctccttgatgaatttgcaagtctgttcagagatcaatgatcagtggccggcgagcttggccagcacgttgtcaacaatgcgttcggacatgcccaggtgcgtccggggttcgaacagccgggccagggcgccgtcattcatgaccgcaagcacccgcgcatcggcctcgattgcctcgcggatcgacacgtgattgcgctggctggcctgggacacttcgaagatgatctggtaggcgctgctcttgcccagcttgcgcgccatttcgaacaccaccgcttcggtgcagatggcatcgccataggcctgggcggtgccttccatcttctgcacattcacggtgagcccgtcgatggtctcggtcagaatcgagagcgccatcagcgcatagtgggaaacgtccgcgaccgcgcaccactccaaccgcgtgccgcggtaatcacgctcatgctcaagaatcatcgcgtccagcgcgagcatgacctgggccttggccaaccgcgccaacaccaccacttgctcgcaaccttcggggttgcgtttgtgcggcatggtgctgctgccgatctgttggtcgctccagcccacttccacttcagcgatttcccagcgattgagcgtacggatttcatcggcaacgcgggccaacgaggcggtgaccatggccagggtgctgacgaactcggcaacgcggtcacgggacacatgccagcccgtgagggggacttgcagcgacaagcgctgggcaaaacgctccagcatcggcatggcatccgggccgaacgccgccatggtgccgaccccgccgaacaactgcaccaccagcacccgctggcgcgcctcggccaggcgctgacggtggcgcaacagctcatcgatccagccggcgaccttcagtccgaaggtggtcggcaaggcgggaatcgagtgggtcctggcgaccatcagcgagtcacggtgcgcatcagccagggtcgacaacttgcccagcaaggtctccagggcctggtccattgcatcaagcacatcgcgcatttccagggactgggcggtgtcctggatgtcttgggtggtagcgccgtaatgcacgtactcacgggcactggggctgcagtttttttgcagggcgctgagcaatggcatcagcgaatgcccagtggctgccacgccctcggccagttggcgcacattgatgcccgacagcaacgcggccttttcgatctccagggccgcctcgcgcgggatgatgttgacatcggcctgggccatcgccagcgccgcttccacgtccagccaacgttgcaggcgacaatgactgcagaaaatcttgcggctctgcgggccggcatagcctgaaccgtgggttttcgaatcgagaatgtggctgtgttcgtggcggcattgctcgccgtcatgatcaaagcctgggtggtccgaccgtgcggtgcaagatgcacgggcggtcacttccaatgtttgcgcatccatcacataccctccatcgcgtattgggactgactggtattgcctggggttgcctgcgtcgcttcaaggccatggccgcaagcgcgaggcagtgctttagttgccaccaaatcgaccatctcggcggcaagccccgtgtaggtcgtcgggtcaagcaggtcatcgagcgtttgcgggctgaaacaaccctgcagccgcgagtcaccaagcagcgcgtcgcgaaagcagacgcctgtgccttgggcttgcagggcgatgtcgtgcaccaggtgatgggctgtctgcttgccacaccgaggcgccagcgcgagcatcacccgctccgacaggatcagcccgcccagcacgtccaggttgctacgcatgcgcgcttcacgcacctccagcccagccagcagcaagccgtccatacgggcgagcaaggcgccggcgtaaatgaacagctccggcaaggccgcccattcgatgcgccaggtggtaccgtcacgctcgtgcaactggaacgcggcgtcggtcagcgcaaccatctgagcgcgcaccagccgcgacagcgcactgatcaggtccaccgtcgacgggttttgcttgtggggcatggtgctgctccccacctgccctgcccgtcggccttcgcgcacttcatcgatctcggtgcgctgcaggtggtagatctcattggcgacacggcccaacgttgccgacgcctgcaccagcaaccacgccgcctccagaatgcggtcgcgggcgctgtgccaactgctcaatggcgccgccaggcccaggctttccagggtgcggcgctgcacatccaaaccctgcgggccaagcccggccagggtgcccacggcgccggtcaggttaccgaccatcacccgcgcataggcttcgtcaaagcgttcaaggtgccgatcgatctcatcgacccacaccgccaccttgtagccaaacgtggtgggcagtgcgtgctgcccatgagtcctggcgaccatcggcgtgtgcttgtggcgcaaggcgagcgtgagcaaatgcccacggatgccgcgcaggcgctggaccaccaggccccaggcatcgcggatttgcaggatgaggccggtgtcgaggatgtcctgggtggtgacgccgtaatgcacgtattcacccagcccatcggcacataacccctgcaaggcgcgcagggtcggcaccaggatgtgcccggtttccaggccctcgcgccccaacgcgtcgaggtccagcagttccacgctggctacccgggcaatctcccgggcggcctcgtgggggatgaggcccatctgcgcctgggtcgccgccagcgccgtttcaacatcaagccacttctgcacctgattggcatcagagaagatcgcggcaaattccggggacgagtaagcgcccccgtggatacgggattcagtgatatgacttggcatgtcgagttactcgcgttgtcctaaggagggctacttcacgcgttgcacgtgttcccagactgcatcgtagtaagcccgctccagccggaagtgctcggccaaagacgtcaggaacgcgttctggaacccgaggtccggaatacgccgtgagatcagtgcccattcacgcttggcccgtggcggcaccaggctgatatgcacttcgtaatactccgcgtcgtcctggctcaagcccgcattgcgcagggcgttgtacaacttgccgtggttgcccggcaccaccagttcagtgatgtagaacaccgccaggccccagccgacatcggggttgcggaaacagcgggcgcggttgttgaggtaggcgatttcctcgggcatcgtcgagagcgcctcgaaatcggcattcaggcccacggcggcaagcagcttggccaacagcttcgggtgggaacgctgctcatcctcttcgcccaactcaccgtagagataacgcgccaaggcggccgcctcgtctacgtcagtcaggttgaccagcaggtcggcggcgtcccggtacaggcggtatgtgcggaaccattggtggcgcaaaaacacctgcagttgctcgcgagaggctttgccttcaaacacatactgcgacatcggatggttttcccgcgactgcgcggcaatctgctcttccaggcgctgctggaaaccggcctcggacaagggcgatgccaggtcggctgacggcatgaaacgctcttgcacgctgtaaacggcattcgccagccaacgccgggtcgaggcggtggccacgtcatcgctcagcgacaggatgtacagcaattgctggcattgtgccgcattcgcggcgtcaccgcgttggccggtctcgcacagggcgcgcagcatattggcggcaatttcgatgcgattgaacgtcgcgtccggcttcaaggcttccgccaacagacgggcttcggccgtgtgaatattttgcaattgcggcagggaaaaattacgtgggctcatcatgtgctccattatttttgttttcggatcgcaggtcgttcaggcagacaggcgttgggcctgcatctgctgccacaggctgtcgaagtaggccttgttgatttcgaagtggcgcttgagtgcgcgcatgaacgtgcgctgaaagccctcctcgctggcaaacttggcaatcagggcccacatttcctcggtgtcgatctcatcctgggtgccatgcaagcggtggaattcgctgggctgctctggaacgtcgaggcgctgcaacagctcgtagatgcgccgatggttgacgcaactgacagactccaccgcatagagcagtgcaaggccccaggcgacatccgtgtggcgcacacagcgaatgcgattattcaggtaggccttttccagcggatgcagcgcggggaagtcgatggccagcggaatatcgaaatactccatcagatgggcgagcatcgccgggtgcgaacgctgcggcgtctcagcccctgcttcaccgtacaggttgcggtaaaacaccgaggcgtcttcgatggcttcgaagcgaaaggccagttcggccagcaggctgtagaagttgtaggaacgggtccagtgatgctccaggaagaagcgcacatcctgcaccggcggcgtcccttggaacaggtgcaccgacatcgggtggttgacccggctgcgtgcagcgatttcagcgtcgacctgctgacggaacgcctccaccggcaacgcggtgaagcccggcaagtcggcggcgaactcatcttcgacgcggtaaacctcgctggccatccagcgccgggtcggttcggtgcgtgggtcaccgggaatgtgcaattgcagcaaggctgactggtaatgcgcgtaggcgccagcgtctcccgccaggccttgccgagtcagtgcgagcagcgcttccagcgcgcgggtgacctgggtgtaattggcgccaggttccaaggcattcgtcatcagccgcgaggcggtggtgaagagatcggaatccgagcgttgttgcagggcagcagtatccattgataacccctgaatcttgtttttgtggttggacatactcggaaaaaagcctaaaggttcccgtagtggcaaggtcaacacctgtaggaaaattctttcaaaggcttggcaaccaacggtaaccacgatgcgaagcgagccgctcttgatcttgatctgcttttgatcttgatcttaggcgccctgttaaaccacgctggccgaacgcaggcttgaattcgtgggtaacccggcagaacgccgggttagccgtcaggccgtcatcgcaggcaagccagctcccacagttggaccgcggggtgtcagcgtcggccatcacaccaacgccctgcgctcgcgcacaaagcgtggcatctgatccccaggcagcgccttgctgaaataccacccctgaataaacaactcaggcccatgactcaagaacgccaactgctcagccgtctccaccccctctaccaccacacccaaatccaaggcctcgcagaagcgcaacataccggtcagcacctgggcgcctttagggtcacgctgggccaccacaaaactgcggtcaatcttgatgaaatccacaggaaactgatgcaagtaactcagcgcagaaaacccagtgccaaaatcatccagatagaccttggcccccatgccctgcagcttctggatggtctggcgagtggccgggatatcactgaccagcgcgtcttcggtaatttccactgacacctgccctcgggcctgggcaagaatttccaccaggcggtcgccataggcggcgtccttgagcgtggcgctggaaatattgatggtcatcggcagttcaaaacccaccttcagccatttctgatactgacgcacggcctgggacgccacccacacatccacgtccggcatcagcctggcgtgcgccagccattgcaggaactcccagggcgaatgcaccgtgccctggctgtcccgggcgcgcatcagcgcctcgcagccggtgcacaaaccggtgcgggtggagacctggggttgaaactcaaggtagaactcgtaatcactgatctgctggatgcggttcaactcagcggcctggcgggccaaggtctggtgagttgccagcaccgggtcgaactccagcaggcggcctttctcttcgaggccgcgaaacgtcatgtccagggatttgaggtacaccgtaccgccatcgctggactggcgatgaatcgccctgacgtagggcgcatacaccagcgtaccggccgtcagcagaacgacctgcaacaccaccgccgccacgtcgccgtgggtgctgaggtaggcattgagcagcaccggggcggtaaacggcacgctggccaccgcgggcgacacccaacccagttgaaccaccatcaacgccaccatcgcgttgaacgccggtaccagtagaaacggtatgaacaggcgcgggttgagaatgatcggcaaaccgaacaacagcacctcgctgacattgaataacgacaacggcaaactggccaccgccagcaagcgcatggactggctcttggaaaacagcaggatcgccaacagcaggcataaggttgcgcccgaaccaccgataaaggcaaaactgcccagcaagccgttgttgagcaggtacagcaccggctcccccgccgccaacgctacgccattgagcgccaccgcctggtccaaggcatcgaataacggctgcatggcatacacgccgtgaatgccgaagaaccacagcagcgaattcatcagagtgacaaacaacccactgccgtaaggcgcctgcaacgcatcaagcacctgcggcccctggatttgcgccacatgggggatcaacagcagcaacgacaacaccgccaccaacgccaaggctgtgagtgcgccaggcaccaccatgttgatggtgcccttgaggttatggccgaccaggtcttggttgaccaggcgcgtccaacgaaatcgatgcagccaggcaatggccggcacattgatcaagggcgaagcaatggcaataaacaataaaaacgtggccgaagcacgtgggtactcacgcagcacgaaggttgcgaccaccacatgggccaggcacagaaacgcgaccggcagctgtggcagacggtgttgaatcgccaacatataaccgatggaggccgcgaccagcagtgggatcaccgaactgatctgtttatgcaactccgccaggaaactcaccacctgcggatcgaaacccagcgcctgggcgcattcggacagaatcaggaaaccggcggacaccaacaggcacggcaggatccaaagcagtccttcacgaatcgctcgcaacgactccgtactggccaggactgccaggcgctgggtcaggaaaagtttgaacagggtgtgcgccatgggccgtcctctgcctgtcaccgactgccgctgaagatcagggccggaaacacccgctaacgctacacgccctgatagccgaagcgaaagccttaatgcccgtccccgcccggcttttttgccagtgaatgccgggttgctagactaaatccttacagatttatcgaactttctgacttgaatcatcccctaaggctgtctgagtcggtatcatccgcacgttttgtgcgtgttatacgatgttacaacctgtctgataatgggtacgcactcagggaatcttgcctggaacgacaacaggccaaaggagagaacctcactatgcaagacaagcgctcaagtaacatgcgtcctctatttgtcaccatcctgctgtggttgtgcagcgtggtgttgctgtttgtgatcaagaacgtcattgagttgtttaccgggcctgtggctgaaacctgggtagacctggccctggtgctggtcgcctacctgatgtttttcttgctcgcgccgttgcagaactggatgcggcgcaggtcgcgcaagcgtgctcgccatcacctcaacgcacgcacgtccgatagcagctcccacccttctcattaaggtgtctacctatgtcggcacctaacgacactcaccagctcgcactggacagattcctgcgcgaacaaccgcaggtcgctgccgagctggacagccttaacccactggtagcccaggccaggggcgaaaccctggcgcagtatcgcgccgaacggctgcatgaggctttcgaagcgtacgctgaacagctaaagctgttcgcctgggaattgaccctcaagctgacggccgactccaccgaaaccttcgaggctcagcgccgcgaagtgcataaagaagtcgcgcaaatggcgggcatggactgggcgcagtactgccagttgcacggcttggccgtttgacctttgccctacatgcaccagcgtgctcggttacgccccatgacgtgacgcaactcggcgaccgttatgcttcggtgctgcgggtctatcgccaacgcggcctgtaacgctgcccagcaatgcctgggcaactgcgcgggtcggggcagccggtctgtaaaggcgcgcttgccaacgcgactgccgtgggccagttcgtacaggatgcaggccacgccgtaaaggtcggcggcagcggtcagcgcaccgccggccaacagttccggggcggcgtaggcaggtgtccaggcattgaaacgactgcggctgacactcggcaaccctacggcagcctctgcttgagcatggcccaggccaaaatcgaacaagcgcacgccctcctcgcccaccatgacattggcgggtttgacgtcaccgtgcagaacatcttgctggtgggtgtaaaccagcgcatccagtaactgcaaggcgatagggcgcaactcccgccagggcaagccataggggcactccagcagcaggcggtccagcgtcaccccttgtagcaactccatggtgaaaaacgcgacgtggctgtgtatatcgacctcaaacgaaaacacccgtaccacacgctcatgccgaaggctgcgggccaaggcaaactcgcggtacaacaacacatgggcgtcggggcactgggaaatgggttcgtcgagtagcttgatcgctaccttggaacagggttcgcccaactgctcgtgcaacaggtcgcgcgcgcggtacaccctgcccataccaccgctgcccaagacacgttcaaggtgataacgcccagccaataaacgggaagatgaagctgtcgagttcaaggctgcaccacgaccgcggtcaggtcatcacgtaccggcctgcgcaacgcccctgcaaatagccgttccactgcccgttgaggcgtgcccatgctcaacgcccgccccaggtcaacgtggctgaggccctgatacaagccatcactgcacaacaaaaacacgtcccctgggcgggtgcgcagttccagtacttcaaggtgcaaacgcgaacgcgcgccaacggcccgggtcaaggccctggcacccgggtaggcctgggcttgcgccgcactcaactgccgctcgtccataaggcgctgcagcagcgagtggtccttcgacaactgataaaggctctggtcgcgccatagatagcaacgactgtcccccgcccataggcaggctgcccggcccttctccagcaacagggcaaccacggtgctgcccatcgtcacgtcaccgcttgcgccaggctctgtccatgcgcgcctcaccccttggttgacgtcctgcaacctgtggcgaatcgcctgaatacgttggtcaaggttgccgtccgccgacactgacgccaactggctgaccacccactggctggcgacatccccgtgccgatacccgcccatgccgtccgccaccgcccagcaacccgcgcgcgggttgtccaggaacgcatcctcattgcgcaaccgcgcctggcctcgctgcgtgcgcccggcgctgcgccacggggcctccatcgggttcacagctgctccggcaggcgaaaggtacgccatgagtccatgtcaaacgggccaggtgtacgctggctggtgagccggtaattggcacgcaggccggcgaggtctgccttgaggatctgtatatttcggccactggcgggctctttctgcagcagatccagaaaccggaacaacgaccacgccccggtgttcttttcgatacccaagggtcgctgttccgtgcctctctccagaacgaggctgctgcgcccattgtctgcatcggtgggccaatggaacgccatgggtacgatcggaccgtggcgatactccaattgctggtcgccaaaccgcaggatcgcacggctgaccgatgggtccaggctgtaggccgccaaggtgaatcgcacagataactcccccgcgtcttcggtaaaaaaaccgcggcggatgacctgagttttcatcaattgctccagcagcgcacgcgaaaccggcaaactctggccatccagcccacgcagtcggtagcggctgccgtcgacgctgataaaaggccgcaggtagccctcataaaagcgcgccattaccccgcgtggcttgaagaactcctgaaaatcgtgaagggcgacctcactgctggcgtgcgcattgaatgggtaacgtcggcctatcgccttggcgtaaaggctatgcacctcgctctgataacgttggttgacgtgcacataggcctgttccagcagatgccgccaactgtcatcggccacaccttcgagccagccggcaacgggcagcggcaggcgcgcggcggcgtcacgcagattgcccaatgcatcctgctggccctccatgcgctgcctggcgcgcaggaaagccgcctgctcgggtgcgctgtcacggttcaatgccgtcagttgcaggtgtacttcatccagcaggcgcaacgcctgagtcagctctacgccggggttttgctgctcatccagcaattgatgcaaaggctcaaagcggcgctgcaaggcgcgccgcggcgcctcgacaatagccgtctgccctgccgtcaaccgcgacttggccatctcgcccaggtctaccgactgctgggccactttgtccagcagcccatggcctggcaacaggcgcgtgttttcacgcacctgttgcaacagacgaatcaagggcgattgcgctgacgtcaggttcatcagttgctcggcatcctggcgcaggttgtcggtctcttgcagcctgactcggccaagcgcatcgctccaggcatcggcatactcgctgaaatagcgctgctgcaattcagccatcaggcgccgcaagtcctgaggccccaggtcggagccctgcccgagtacccagttgtcctgggtgatggcgttgaccaagcgcgggccctgcgcctcgaagtactgcacatagcgtttggtatagaaccccggcacaggcggatcgatagtggcgaacaccttaccgtcggccagccgcaacggttccaggctgcgcgcttgttcgcgcaatacccgatagaccccatcggccaacgattcccccctcagcgcttcacgggcctgggccagccgttcctggttgagtgacaccacaaagggttgctccagcaaccgcgcaagatgcacattgaggcgcttctgtgtcggcatatccccggcaaaccgcaccgaccaaaggctcgcaatatgttctgccagccaggtcgtgtcacggcgttcgcgcagattgagcatcaggtaggcccgcaggtcgtcgagcagccgctcccggtccccgagactggcaattacctgttcttccaattgggcggctgtccaggccagaaatggcttttgcagcgcgtgatcataggcttgatcgacgctgggacggctcagttcgccctgatacagtccggtgcgctccaccaggcgtacatctgccggctctggaaaaacctgggtcgccgccagtcgcgcgtccaacagcgccaacagcgccgtgctttcatcgccggccgcaagggcgagcggcgggtgtgaggtcagcgccgccaattgcgccaagcgttggtggttgacggagtaactgtgcccccatagcccgccgacaccgccaataaccagcgccgcagccatcgcctgcgcgccctggcgccaacgcagacgttgctgttcctgagcctgcaaacccgcaaggtcggcctcggcgaagatcacctggctgaacaggccctgcacaaagcgcgggtgcctgccatcggcgcaggtcaagaagaaccctcgcaaaccgttgatgggttggtagcgatgagcgcaaaacgccatgtcaacgaacaggctgacgcgctcccccattcgtgctgcctgctggggaaactccagcatctgcccacgtcgctcgacattgcgctcctgatgcaatcgcccaatcagttcactgttcaagcgttgcaataatcgctcgaccgcctgacgaacctgcgtcgtgtcagtcccctcggcgcaggcatgcaggtgctgcccaagcacactgtcggcactttctccaaggggtgagtcgaagtactcagcgaatcccggcaactggtcggcgtgggtcaacaccaggtaaatcggcacatccacatgcagcgtctgttggatctcctgcaagcgcgaatgtacgcggcgggcatgatgatccaggtcgtattcagtggcgctcgccagcgtatcggccgataacgtcaccaccacaccgctgagcgggcgcactcggcgacgccgcctaagcagttgcagcaaggtagcccaacctgcggcgtccactgaacggtcgggctgggtaaggtagcgtcccggggtgtcgatcaggacaccttcgtcgccgaaataccagtcacaatgggcactgctaccgatcggccgcgcttgcgcgtgatccagcgccagcggtaagcccgctgccgccagcaactgcgtcttgccactgcccggttcaccgatcaacaggtaccaaggcaactcatgacgccaacgtgcgttacgctctccataatggcgggacgtcttgagcaggtgcacggctttcttgaaccgactgcgcaggtgtcggcgttcgtcctccacccccgtcatcggctgctggcgcgcctcgcgctccggcctttggcgccaggcggcaaaaccgggccccgcaaacgccatcgccagtccccatagcaagaacacaccgctgatggtgaccagccgcgcagtcgccccggcccagatacggtggtcatccaccgccagcagcggccccaaaaaccacaccattgccgcacaggacagcaccagcaacaggctccacacccaaatcctgcccagcacggtgcccatccccttgaagaatgcgatcattcattgctcccagcgtttacaaaggcgtgcggagcagatccgacgccgacagttgaaggggttgcagcgcgtgcgtacgctcgttgctcagtacccaggcaaaccctgtgtacatcgccagcacacataccaaggtgaggccgacccaccaagtggcagggatgacacgcaccagcttgcgccgttcggcctttggctgggcaggcagtagcgctaccgccgccggttccccacgtacatgcctgatctggcgatacaacgcatcgcgcaccgcctcaagttgcgacacgccccgctccatcacccggtatttgccttcgaaccccagggacaggcacaggtacagcaactccagcatcgccaggtgcttcaccgggtcgcgcgtgaggcgctccagcaactggaacactttttcgccgccaaaggtttcgttatgaaagcggctcaacaggctcatcttcgaccattcgctttgcgccccccacggggtcgtcaccaccgcctcatcgatcacgctgcacaacacatagcgtgccgacatgacctggctgttctccacgccgccctgcaaggcgcgggtttcgaactgagtcaccgccaacgctaaccgatcgttgagtgtgcccaggttttcacggccggagcagaccctgagccctataacttcaaacaataccgcccaggctgcggcaaccagcgggttgagccctgcctgaaagctctgggtatcgagcctgtggcccgcgtagatcatgcggtcttccaactgttcgtagcgcggcggcgacgggaaatccgtcaacggcccctgggcaggctcatgagtctcccggtcgagcaggacggttttttcatcctgagtgtattcactgtccatggcattcagttcctgatggcccagaagtcgagttcaagcccggtgaattcaccccctacgtggaaagcgaaaccgcccgactgctccagttgcgcgatatcacgggggctcatatcgagcatgaaataggtcttgccggcatggaacggaatctgtcgcggcgccactggcaagggtttgaccttgataccggccaagtgcaggttgaccaactcgcgtatgcgctcaaccggcgcgactttcaggtgtgccggcaggcgctggcgtagttcatgcgcctcacactgcgcggtggctgccaggatgaaggtggcggtgcccagcagtttcaactcgctgaccgggcataccagaacgccgtattggcgtggctgcaatgtcaactcgatcgcctgttgctccagcaccaccgacagcgccatgcgcaactgcgccatcagagcgcgaaaactggcgccctgatcaccgtgttggtaatgaacatccaactgcgcgcgtttgctgtcagtggtgaaggttgatagctccccaagcagcgacaccagcgcacggaacaccgcttcgggccgcacccgcgcctggctcaggcagtggcgcagctccagctcgctacgattgatcacttgcagcatcaggaaatcgacgatgtgcgtgcctgcggctgtgctctcgccacgaatgcgcgccgcgatggcatcgccccggctggcaagcaggccaattacctccttgaggcacgacgccacgtacccgtgctcctgcacgaagataaacgtcgggatgaacgccgtatccagattcacgccgccctcattgctggcgttcagtacctgggccaccttgagcttgacgaagtgctggtcacccggctgttcacccagcacaagacgtaaatccgggcgcgcgcagtggattcggcaacgcgtatccacgcccacgttggagtctcccacttccacttcacagctgaggtagcgcgccaacacctcgctttgcgcaggctggcggacctcaaggtgactgccgctggccagcggcagcgccaggtaaaccccttgcgtgcctgcatcctttggcacctgcagcaccagcggctccatggcggcattcaattcaaacaggctgccgtccggtaacacgccactggcctggttgaccaccagcttgcccagcttgaggtactgtgtattgagttcgagcgtgagcaaaccccaggtgtcactgcccagcaggcgggtctgattgagctgctgctggtaataacggtcgttgtgctgcaagtgctgtggccgcaacaacatgccttcctgccagataactttatgaacctgcatgttattgcgtctccacagcagcgagcgggtcagcaacacgtataccgccctggtccagcaccagctcggcacggttgcgttgctgcaccgtcaagggcaccaacagccgccactggacatggggcaaatctcgataagcggccagcactcccacaaaacggctctcaggagcgatgcgcagtttgagcgccagccggtcacccgggcgcagttcaacctcctcgctgccgacccagtccttgggcagcgcctgctgcgcattgccatacaggctgaagaagtcggcatgttcaaaggcgacgccatggcgcagttcgatcaactgcaccaccacgggagaaggacgaccgtgcaggtccgggttgacgagctcgctggcggtcagcgccacatccagcttggtcagcgtggagaatggtgagacggcgctgcagcccgccaatagcccgcacaagagcaacagcgaaacaagggtggctcgatacatgactatcatcctggaaaatcaatgtgcaggctggagagcaggcgcaactgctcctcgtaggctttggcgaagtcgccgcccaacgggcgatcattctgctgttcttgcgccaccacacgctggtagtgacgctggtaggcccgccaatgcccgccatcggagaaaaacccggccgatttgccctgggactcaaagcaccccaacaggtggctgggctcaaaggccgcgcgggcgttacgtatggcgcttcgacaagcggccagcagcgcaatctgatgcacctgcagttctcggtgcacctgggcaatggcgcgcacggcaggcagttgccccaactcccgggtatcgagcatcgcggccaacgcagcatcggtgtcgcgatacactttcaaggggttctggcccgtgccctgactggcgaacgccgccgtacccaattcgttattcagttcttcccgagtgcgcaaaccgtgttgcagcccttcgatcgtcaaccgaaacaagcgtgccaccttgatcgccagtgcctcccgggccagcgtgtcgagggccgtaaggtcgacacccaggaccgctgcaaattgtgaccagaacacctcgttggtcgacggcgtcatcgcaacagcgggtacggcggcaacccctatcgaaggggcttgccgacgcggcaatgccacgtgctcgctatcggccccaaagtgatctgcccatatcgcttgctcatcggcgctcttgttcaaggcctccagatcatccgaggtggcctgcagctggcgatcaagctccaagccgtgcagcgggtccagcgacaggaaagcgtcatcggggatcggtactgccgcgggcgtcagcaactcgtcggaaggtcgcgtcgattccagcaggcgcgcacgtatcgtcaatacccccagctcaaagacgtcaccgtcactgatcaatcgcgcctgccccttgcgcaggcgctcaggactgctggccagccctataccgttgcggctgatatccgtgaggaaataacggccttcacggtaaccgatcaacccatgatggctggagagtacgcggctggcgtcagggatcacccagtcacatccagggccgcgcccgatcacgccgcctgcaccgtcaaatactttgcgggccaaaagtaggctcttgtcgctttcgcacgcgcagacctcaaacacaagctgcagcttcatgccctctcctttcagcggccacgaatgatcgcctgcggatcacccaaggggtggtactcggcatcatcgaacacatagttggcgttacagcctcccaacaaacacatcaccagcacgacgacgtgccacgcacgatcaggcatcaggcttctcccccagtaaaagtcgagtgcgtcattcagcgttcctcccgggcatcaccaaagggaatgttcaaacgggccagacggtaaagcagggtacgccgggcgaccccaagctcccgcgcggtacgggtgcgattgccgtggttcttgtgcaggcagtcgagcaggaacgtgcgctccactcgctgcatacgttggcgcagcgtcacgtcatcgggagtggccggctttggtgccaggggcagcgccaggtgctcgggccgaattatgcggtcgtcacacaacaacacggcgcgctccaccaggcatttgagctcgcgcacgttgccgggaaaaccgtggctggagagttgatcgagggccgtattcgaccactcgacaggtggccggcccaacgctgcgcacaccttggccgtgaaatggcgcgccagttgcagcacatcgccgtctcgctcgcgcagggccggcaaggtgatggggaactgagccaggcggtaatagaggtcttcacgaaagcgcccttcggcgaccatcgccgcgaggtcgcggtgggtcgcggcaatgatgcgcacgtcgaccttgtgtgccgcactggcacccagcgggcgaacctcaccctcctgcaatacccgtagcaatttggcttgcaagggcagcggcatatcgccgatctcatccaacagcaacgtaccgccatgtgcggtgtcgaacagccccgcgtgattgcgttcggcacccgtgaacgcgcctttgcggtaaccgaacagctcgctttcaagcaagccttccgggaacgccgcgcagttttgcaccacaaacgccttcgccttacgcggcccggccgcgtgaatggcccgggccaccacttccttgcccgtgccggtctcgccctgcagtagcacggtgtaaggggtgttcaagactttactgatcagccggcacgcctgctccatcgccgcgctggtgccaatcaagccgtatgcaccagccaagggtgtgttgcattcgggctgtgtgccaacgttgggctggccatcgcgcagtatgcgcaactggttgacggcgaagctgcccaaatgccccaaggagggagcgtagccttgcagctgggccgggtgttggcgggcgcacacaagcacaccagtcatgcgttcgcaccggttgaacagcggcacgcttaagagtgcccgccaaggtgtcgccaatgctggcaggaaacacgtgtcatggccgctgccttgcacatcctccaggctcaacgctgtgccctgggtcaaggtgtcgtgcagcaactgttgggaatgctgaccaggccgtgaaggcactacggcgagcgacggcacctgggcaagatgttgggcgatcagttcaagcccgccggtcacttcatcgagcaggtacaattggctgacgtcgcactggctcagccgggccgccgcgctgacacatacgtcaagcaacgcgtgttcatcacgctcgaaccccaagcgtgcgaaacaggcagacagtgcgtcgatcatgtgttgcaaatccctgttcatcatgtccattcatccctaatgaaaattgccggttagcgtgacgacgccatcggcccgctcgcgccccaaccaggtggtccagcccaagcggcaaatcgtgttttcgccaatgtgcagggctctgatctgaccctgtgccattaccagacgcaggtcgtattccaatggatcgcgcagggtcaggcgcaccagcgagcgcagcggctgacaggcctttcccgtgggaaggaagtcgtgaaaacgctgccaccccaacgcgcggacatgcaccctgaacttgccactgcggtcagcgacgcggcgccccagcaccaggtcctcgccaagcacactgttggcccgtcccaagtcattgcgctgtacctggctgacctcgacctggcgttcaacccactgctcgataaacaacgcgtcgtgcttgaagtagtaacgcaggaccgactcaatcaacgccgccgagtgcacacgcacactcagcaggcccaggtagagcagcaagcgcttgcaatcgagctggcaagcgccacggatcgcggcaccaccgagccccgtcagggcaaacatctgctcggaaaaaccgtcattggcgcctgcccggaaacacgcccgatagcggtatttgcgccagatcgggagcatcagccggtgcaggcgatgatggaacagatcgaggaagtctcgagtcgggttgccacccggctgttcggcaaatgcctgctcaccataaaacgcaggcagtggggacccggcgccaaataaccccagcacattgagacgcaggcgtgcgcgcaaatgcccgtgttccataaagaactccactcggtcaatatcgtgcgcggcaaaccccaagccagggttggcctggaactccaactggtcgtacagcgcgtcctcatccagcagcggatgagcctcacgcaatcgctcggtgacctgcaaaaccgcctggaacagcgtgtattcacggataccccggcaaagttgattcagagcaggggttgctgcccgatccgggatggccatagatacacgtctccttgtgtgctgatgacacgcaactcgtgatgggaattgaggctggcataaagcgcaaagaactgattgaggaccgaagcgaatacaaacaagtcgccctgaccgacaaagccctgggaatcgacggtcagatcgacccgcacacctcgcacgggcaacccacgatgaaggcgatcaatcgcctcatgacagatagcgcgcaacgcccccagtcttttctggctgaccttcagcgcctggcgatcgtaataacgcggcaggtcgtaggtttcgagaatcactctcaaggcgttgatatcggtcaacgacaaatagttgagcgacatgttgctgatgagcttccacagaaaattctggtccaggggcggcgcgtagctcgccgttggcgcggtgatattgcggaacgtcaacgactccggtgtctgttcgccgggctggttgatgtcgcctgcacgtaattgccgtggcagattgcaattggtgcaggtcagttcaaccgacagggtttcctggccctgttcgcggcgattgccgaaccccatccaggtgtcgagcccggcatgttggaccgacgaacgttggcgaatgctgtagctgggcggtgccgccaaaggctcactgttgcaatcatgttcaaacgactcgaacggcacgtaggtttgatagcccaaaccaccggggcgccagccggtgaccttatccacggaaaacacgctggcattgcccggcgtgtattccccaggcaccaggaggtactcgtcctgtttaccgtccaggcgaatgggaacggcatcctgggtaaacaggttgacgatgggcgtgcaatacagcttcacgttatccagggtaggacgcaggggctcacggccctgggtgcgaagttcgaaacgcatcaccaggccgtgcgcctgccggagcaactcgtgagacaacgtgtgcaacacgtccaggccttcgacatcgacaaacaggtacttctcgggaaacgcgaagtactcctgcaggtgccgataaccctccagggtgttctgcggataaggaatcaacgcctgctccggggcaaaccccaccggccggacgtggttggcattgagccgcagcgtcacgggttgaccatcgccggcgttgatcggcagaccatcgtgatccacgagctgcaggctgatgccctccaggtgccgcaataggctcagatacagtccctgactgatgtaatggtcaccggccaggtgcagtcgcagcgaatcgaatatcaactcactgaagctgccgtcgacactcatgcgcaggcgcaagtccaaccaggccccttcgccctggcatctgtattccaggccgttgagctgcaacggcatgacgtcggtggcatagcaggtgcggaaccggcaacgctctccttggatgggggcgctttgcacagcagtgtcccgagccacccgaacgctggggccggcacgtttcaacgggtcgaattgcaggatgctgaaggccggtatcggccgcatgtaatggggccagagcaggtgcatcaatgagtgcgtcaactccggcagttcgtcatccagcttctggcgcaggcgcccggtcaggaatgcgaagccctccagcaagcgctcgacatccgggtcctggccggcttcgccaagaaacggcgccagggcgggattacgttcggaaaaacgccgccccagttggcgcagcgcgctgagttcactttgaaaataacggttaagcgtcatcggcacagacctcaacccgcccggtatcgataaggcgcgcgtggaacaccacaggatgcagggcaccctcaatcatccgctcagcctcaatggcgaatgccagggacaaggagtcacgcacaaccggcagcagcctgacacgtacattcgtcagccgcggctcataggcctggataaaccgttcgatatgcaggcgcgactgactcaaggattcatgcaagctgagccgcatgtcattgaggtcaggcaagccataatcaggcagcgtccggacactgcccgcacgagtgctgagcattttccccaaatgtgcggcgatggacgccacggcggcgcccgggttagacgcaccacgctcaaggcgttcgaaaaggctgttgtgctcaagcatgccctggcctctgctcattctttatcgagcttgccgaccagggacaacgtgaagtctgcccccatgtatttgaaatgcgggcgtaccgtgacgttgacccgataccagccaggctctccctcgacatcgctgaccacaatgcgcgcggcacgcaaggggcgacgcccacgcacctcggcgctggggttttcctggtccgcgacgtattggcgaacccatttgttgagttccaactccaggtccgtgcgctctttccatgcgcccaactgctcccgttgcagcaccttgaggtaatgagccaggcggttgaccaccatcatgtagggcaattgagtgcccaagcggtaattgagctctgccgcccggccctcctcactgatgccaaaggatttgggcttctgcacggagctggcggaaaaaaacgctgcgttgtcgctgcccttgcgcatggtcaaggcgatgaaaccttcttgtgccagctcgtactcacgccggtccgaaatcagcacctccgtaggaatcttggtttcgatctcgcccatgctctggaagtgatgcagcggaaggtcttcgaccgccccgccgctttgcgggccaatgatgttggggcaccagcgaaagcgcgcaaagctatcggtcaggcgagtggcgaaggcgtaggcggtattgccccacaagtaatgctcgtggctgttaaccacattctcctggtaggcgaaggtcttgaccgggcactcaagggggtcatacggggtgcgcagcagaaagcgcggtacggtaaggccaatatatcgggcgtcttcgctctgccggaaactttgccatttggcaaactgcgggccttcgaaatggtcccgcagatccttcaggtcgggcaacccggtgaagctttccaagccgaagaaactcggccccgccgcagcgataaagggtgcgtgggccatgccggcgacgctggatgcgtattgcatcagtttcacatcgggtgcactgggcgaaagaaagtagttggcaatgatcgcgcccaccggctggccgccaaactggccgtattcggcgctatagacgtgtttgtacaacccggactgggtaatttccgaggagtcttcaaaatcatccagcaggtcctggcgcgagacattcaacagctcgatcttgatgttctcgcgaaaatcggtgcgatcaaccagcaactgcaagcctcgccacgaagcctccagtgcctggaactccgggtggtgaagaatctcatccatttgctcgctgagcttggtatcgatctcggcgatcatccggtcgaccaggcgtttttttaccggttcgtcacaattatgtggcttgaccagctctgcgataaacgccgacaccccgcgcttggcgatgccataagcctcgtcgtcggcgctgagcaatgtctgggaaatgatgttatcgaggatgctaccgccttcgataacctgtatgggttgcgtgccgtgttgaatggtggtcatggtgtcagtgtccttttactgaaaatgtcaggcttggggcctatccagccccaattcggcgagcactcgtgcgcgcgagtcgccattggccagcgtccgctcgatagcgttgcgaaagctgggcgtattacccagcgggcccttgagcgccaccaacgcctcacgcaaagccatcagcttttgcaattgcgggatctgctccaccaggttcgcggggttgaagtccttcatcgtgttgatccgcacctggaccggcaactcttccacgtcggctgcctcctggaggcggttgggcacgctcagcgtcaggctcaatgcttgctttgccaacacctcgtcaaaggtgtgcttgtcgatgccgatgggcttgcgatcctcaagtttgcgcgggtccgtgcgcagggaaaaatctcccagcaccagcagcttcaacggcagttcgacgtcttcctgagcgctaccgacggcgggtttgaaggtaatgttgatacgttcctttggggctaccgaaccgtctttggccatggtgcttttcctttttgatgaggcactattcaagtactgcttccaggtcgaaatggcacaaccggcgatgcagggtgtcttttgcgtcttgtacggtttggctttgtggcaacaggtcgtagcagcgatacaggagctggccgacttgcacggccaactccggctcccaattttccaggcccgtgcgctgtaactgcaggtcgagttgttccagctggatcctggccaggtcatgcttgccggccgccacacacaacctggccagcgccaggtgccaatgaaagcgcgctcgatcaccgcacgccgcccgcagcccttgcttgaacacacccaccgcagccttgaggccgtccttgcgcaggcagggcatcaccgcttgcaacgccgcttcccaaggctgggcgaggctgtcgacgacaaccctggagggctcgggcttgtgtacgtgacgcatcacatgaagcgcgatccactcacctgtcgcggggtcggcaaagggcgtgccgtcctcgaacctatactcaggcaggttcggcaggcgatgcagcagcagagcgaattgcatttccagttcggtcatggccagctctgcgtgcaaggcctccaggcactcccagaccatgcgcaacccgtcgaaccagaacatcgcaccggccaggctgacctcaagttcaagcaacagatcggcgtaatggccttggctgaagcggtcttgatagcgcttgcgcttgtcgccagccaatgggcgcagcgccgtcacccgctcactattggcgtcgggataattgacgagcatcagccaggccagggttcggcccaggcgcaaggcacgcgggtcggtggcatcctcacgcaaccaccaggcacacaaaggccgagcctgctcctgcaatgcgcgcagccgtttgtgcgcatctttttcgttattgagcggttgctcgggctctagccgcggagttggcgctggcttgacctgggcaatgacgcccgcgacgccgccaggttcggctgtagcctgggccaaacgcgccgacagctgccggcgaaccggcaacagcaacggcgcctcgctaccaagctgttcgccccatagccgatcaagacattccaggtgttccagaagcgcttggcataaaggtcgttgatcctccagcgggacgttgtgcgcacacgcttgttcaaggcgcgacaccaaccagccaaacgccgcaatgcgggtacgcagcttaacgggatagacctgcgcccaatgatgctcgcagagttcacgcaacacaccgagccccgccagcaacccagcaaatgaatcacgctggtacagggcccaaatcaaccaaacgaggacgcgcagatccttggaatgctcacgcagaatgcactcgctgatttcgctgatcttctgccaatccggcaggcccgcaccatgaatggagtgcgccttgcccagctcggtttccagcacttcaaactcacttgaatagcgcatatcactgccaacaaaactgcttggcgagcacgctgtccgtgcaagttctaagtaataggcatattgctgttctgaataaacgattttgggctgcacacaaccatccaaggcaaagtaggcaaaattaacatcattgttaaaccgcccttgaacttccgctcaaaacacattgaagtgagcgaaccttagccacgaaaaaaacaatcagcaagcaacagaacgaaacttaagaaacatcctacaccacttgaaaataacggcctgcgcagctatttgcgcagccaacccaagcgaaacccatcatccacagcctaaaaccatgaatttgccaaacatatgacatgagcaactaaatgcgcatatctgtgcaactaatgacactaaaaaccacccacagcactacagcaaatgctcaataaaggatgctgagtatttttcgcccttatttcattgagcctcacactttcaggcacgcttcttgttataggaacctgcccggtcagcgctctcgctgcccggcaatacctactcaaacaggcaaggaaacccgtcatgcccacacccgcgtacctctccatcaccggtgtcaaacaaggtttgattacggcaggcacatttacccaggactcggtaggcaacatttatcaggaaggccatgaggaccagattctggtgcaggcgtttgctcatcaggtaatcattccccgcgacccgcagtcgggccagccgaccggtcagcgcgtgcataaaccgctgatgatcagcaaggttttcgataaatcctcacccttgctgttcagcgccctgaccaccggcgaagaagtgtcctgccgcctcgaatggctacgcacctcctcggccggaacccaggagcattacttcacgattgaactggaaggcgccaccatcgtcgacatccaatcgcgcatgcccaactgccaggccccagacaacgcccacttcacccatctggaggatgtgcacttcacctatcgcaagatcatctggactcacgaagtcgccggtacgtccggctcggatgactggcggagcccagtgacgggttaacgcgagcagtaaagacggtaaccacgatgcgaagcgagccgctcttgctcttgctcttgatctgcttgtgatcttgatctcaggcgccccgttaaaccacgctggccggaattcgccagggatttggggggtaaaccggcagggatgccggtggattacgggcacaccgagcctaagcgaggtgccgagtggtggggcaagagcgttttgcttnnnnnnnnnnnnnnnnnnnnnnnnnnnnnnnnnnnnnnnngctcttgccccaccactcggcacctcgcttaggctcggtgtgcccgtaatccaccggcatccctgccggtttaccccccaaatacctgtcgaattccggccagcgtggtttaacggggcgcctaagatcaagatcaaaagcagatcaagagcggctcgcttcgcatcgtggttaccgtccgctgttacagtccacaaagttgtgtagatacctatgctgcgatggcggcttacctgctggcatattcagtggctgtcacgccgccatcgccggcaagccagctcccacaggagagtgcattacgcccgcctgatatcgccatttattgcaacctgcatgatctggctaagttcaatttaaataaaccattgaaattaaaggaatttaattttagtcgcagctggcacgctgcctgcactgtccgttttgagacttgtaacatcatttttcgtgcctggagcaaaacaacaatgatcacatcctcatccacgctgcaagagtcaagcacgctctccggggtttcctggggggcgattttcgccggtgccgctgcggcggccgccttgtcattgatcctggtgttgctgggtttcggcctgggcttttcggcggtgtcgccgtgggctaacagcggtatcagcgccaagggccttggcatttccacgattgtctggctggcgttcacccagattgtcgcttctggcctgggcggttacatcgccggtcggttgcgggtgaagtgggccaacatgcacggcgacgaggtgtactttcgcgataccgcccatggtttcctggcgtgggcagtggccacattgatcacggcgatgctggtggtcggttcggtcagcagtgtggtcagcggcggcgtgaaagcgggtgcgagtgtggcttcgggcgcggccagcggcctcacccaggcggcgggcagtgcggccaagggtgccgacagtggtgacttcggttattacgtcgacagcctgttccgcgatgatcgccccgcggcggtcagcgatgatgcagcccacgccgtagtcggtcgcatcctgacgcgcacgttgagcaacgacggccaactggcagcggaagatcgtgcctacctggcccaactgatcagccaacgtaccaacctgagccaggccgatgccgaagcccgcatcgacaaggtctatggcgatgcgcgcaaagccgtcgaagacgccaagctcaaagccaagcaagctgctgaaaccgcagcgaaagtggcggcttacacctcgctgtggacctttgtagcgctgctcatcggggcgttcttcgccagcttcgccgccaccttcggcggtcgccgccgggatgccgtggtgtacgtcgaaaccgaaaactacgttcgttaattcaaggagaacatgatgcgctcattactgctgtggttcctcggcgtgccgattccagtgatcatcctgattgcgatcttcatgcactaaacccactcctggctcgctcctacagagggcaaatagagcaagccttgtcagtcgtcaaatcctacctgctcatggatctcatccaccttcaattccaaccgatacgccaccgcaataaacaacgcctggcacaggcacagcgtggcgctcagcgagcggaaagcaaacgaagaaccttcattgaccaacagcaccgcgttcgcccgcttggccaggggcgacaggttgctgtcggtgattatcagggtcttggcctggtgatgctgcgcaatgcgcaggcagtgctgggtctctttgccgtagggcgtaaaactgatcgcaatcaccaggtcattggcgcgtacgctgcgcatctgctcgcggtaactgccgcctaggcctgagatcaagtggatgcgcttgttggtgtgctgcaggttgtagaccaggtagtcggccaccgcaaaggagcggcgcacgccaaccacgtagatgttgtcggcattgaccaccaggtctacggctttctcgaaggccgcgtcgtccagctccagccccaggcgttcgatgcccgacaaggtggcgttgacgcactcgcgcgccaggtcgccgccgctggccttctgcgacttgttggcgatcatgctgcggatgcgctgctggtagttctgcaccggcgtggtcttgtgggtatacgcctcgcgaaacaaagcctgcatctcactgaacccactgaagccgaaacgctgggaaaaccgcacgatggccgaggggtgcacttcgcactcgcgggcgatgtcgctgatgcggtcgaccatgatccggtcgctctgctggctcatgtaactggcgatgcgtttgagctgtcgcggcaggctctcgtattcgtcggtgatcagctgcaacaggcgttcggcattgaccggagggctggcgacagtttcttccagggtggtctcgggatcggtgcgggacatgggcaatccttctggcgtgttcgtctgatgcgctgatgggtggcgcaagtctacagggtaggcgcaaaaaaataccccggcatcacggcccgcgtggcctgctgaaacgatgcatgggcgctggcgtgccactatcctgaggtattggaaaaaatattccactaaaaataattatggaataaatattgattgctgcccgcggacgttctagtctgctcccaccaagagcgtttgccgtcgccacggcggcacaacgcaggctgataaaaataacaggagccagcatgggccagactcgttttgccagtgggcgtcaattggatctgatttgcctcgggcgcctgggcgtcgatctctatgcgcagcaagtcggtgcgcggcttgaagatgtgtccagcttcgccaagtatctgggcggttcctccgccaatatcgctttcggcaccgccaggcttgggctcaagtcggcgatgctgagccgggtaggggatgaccacatgggccgtttcctggtggagtccctggcccgcgaaggctgcgatgtcagcggcatcaaggtcgacccggagcgcctcaccgccctggtgctgctgggcctaaaagaccgtgaaaccttccccctggtgttctaccgcgaaaactgcgccgacatggccctgcgcgccgaagacatcagcgaagcctttattgcctcgagcaaggcgctgttgatcaccggtacgcatttctccaccgacggcgtgtacaaggccagcctgcaggccctggattatgcggccaagcacaacgtcaagcgcgtgctggacatcgactatcgccccgtgttgtggggcctggccggcaaggccgatggcgaaactcgttttgttgccgaccagaatgtcagccagcatgtgcagaagatcctgccgcgtttcgacctgatcgtcggcaccgaagaggaattcctcatcgccggcggcagtgaagacctgctcacggccctgcgtaccgtgcgtgaactgaccccggcgaccctggtggtcaagctcggcccccagggctgcacggtgatccacggcgcgattcccgcgcgcctggaagacggggcgatctaccccggtgtacgggttgaagtgctcaacgtgctgggcgccggtgatgcctttatgtcgggctttctcagcggctggatcaatgacgccagcgatgagcgttgcagccagttggccaatgcctgtggcggcctggtggtgtcgcgccacgcctgtgcgccagcgatgccgacccccgccgaactcgattacctgttcagcagccccgtgcccatcacccggccggaccaggacgtgaccctgcaacgcctgcaccgtgtcacggtgccgcgcaaagcctggaagcaactgttcgtatttgccttcgaccaccgctggcaattggtggagctggcgcaaaaaggcggccaggcccctgagcgtatcagcgacatcaagcagttgtttatccaggccatcgaacgcgtggagcgcaaactcagcgagcagggcgtcgaggccgatgtgggcctgctcgccgaccaacgctttggccaggatgcactcaacgcggccacgggtcgcggctggtggatcgcgcgcccggtggaggtgcagaactcgcggcccctggcgttcgagcacggccgttcaattggcagcaacctgattgcctggccccaggaacacatcatcaagtgcctggtgcaatttcaccccgatgacgagccgatgctgcgcctggaacaggaagcgcaactcaaggcggtgtacgaggcgtcgttggtcagtggccacgaactgctgctggaagtcatcccgcccaaggatcacccgtccacctacccggacgtgctctatcgcagcctcaagcgcctctacaacctgggcatctacccggcctggtggaagatcgaaacccagtcggccgcagactggaaaaagctcgacgaactgatccaggaacgcgacccctactgccgcggcgtggtgttgctgggcctgaatgcttcccccgagtttctcgccgatggtttcaagcaggccagccagagcagcacctgccgtgggtttgccgtgggccgcacgatcttccacgagccgagccgggcgtggatggcgggggagattgatgacgaaacgctgatccagcaggtgcagcagaccttcgaacagctcatcaatgcctggctcagtgcccgacagtaaatacgatcagatgtgggagctggcttgcctgcgatagcaacctatcagttgcaaatgttctgcctgacacgctgctatcgcaggcaagccagctcccacacaaagcagattccagtgaattctgaagataaaaacaaaaggtgcagccatgcccgcaatccgaattggcatcaacccgatctcctggagcaacgacgacctcccggccctcggcggtgagaccccgctgagcacggccctgagcgaaggcaaggacatcggctacgaaggttttgaactcaacggcaaattccccaaggatgccaagggcgtcgctgacgtgctgcgtccttatgacctggcgctggtgtccggttggtactccagccgcctggcccgccgttcggtggctgaagaaatcgaagccattgccggccatgtcgaactgctcaaacacaacggcgcctcggtgctggtatacggcgaagtggccgactcgatccagggctcgcggatccgcctgattgaacgcccgcgttttcacagtgaacaggcctggcaggcttacgccgacaagctcaccgagctggcgcgcttcaccttgtcccagggcgtgcgtctggcctaccaccaccatatgggcgcctacgtcgaatcccccgacgacatcgaccagttgatgaaacgtacgggcccggaagtcggcctgctgttcgattcgggccactgctacatgggcggcggcgaacccatcgaagtactgcgcaagcatatcgaccgcgtctgccatgtgcatttcaaggacgtacgcaaacccgtggtgcaactggcgcgcaaccagatgtggagcttcccggactgcatcgtcaacggcacctttaccgtgcccggcgatggagatatcgacttcgcaccgttgctggatgtgttgctcgcggccagctacaagggctggctggtggtggaagccgagcaggacccggccgtggcgcccagctatatctacgcgaagaagggttacgacaccctgcgtgcgcttctcaaccagaggacttgagtgatgagcttgttggtcaaaagcagcaaacgcgggcaaaccatggttgccctggaggcgggtcgcctggagtacgtaggctttgccgcctaccgcctgagcctgggcgaaaccctgccggtcagcgccggtgatcaggaactgtgcctggtgctgctcagcggtcgggtgaatatcgaaggtgaaggtttcaattggcagaacctgggtgatcgccagtcggtgttcgaagacaaatcaccgttcgccgcctatttcccgccgggcaccgacgcccaggtcacggccctgagcgatgtgcagatcgccgtctgcgcagcgccgggtgccaagggttttgccccgcgcttaatccgccccgagcagtgcaagcgcagtgtgcgcggcaaaggcgccaatacccgctacgtgtgcgacatcctgcccgacagcgagccggcccattcgctgctggtggtggaagtacgcacgccgtccgggcattcctccagctacccgccgcacaagcacgacaccgacgacctgccgcaccagagcttcctggaagagacctactaccaccaggtcaacccgccccagggctttgtattccagcgcgtgtacaccgacgatcgcagcattgaccaggccatggccgtggaaaacagcgacctggtggtggtgcccaagggctatcacccggtcagcgtgccgtacggctacgagtcttattacctgaacgtgatggccggccccaagcgcgcctggcatttccataacgacccgcagcacagctggctgctggacctctaaacggtgttggacggagaacaaaaacaatgaagtcgccgctacgttttgcccttaaccgcatagtcgccccccacctgtccttgccggatttcatccagttggcggctgccctcaactgcgaggccattgagatccgcaacgacctcaaaaaccgtgaaatcgaatacggcacacccgccagccgcgtgcgcgagttgtgcgcagcgcagggtatcaaggtgctgtcgatcaacgcgctgtacccctttgatgtgtggaacgacgagcgccgtgcccaggcaatcgaactggccacctacgcccgtgagtgcggggccgaaggcttggtgatgtgcccgttcaatcagcctggcgatacgcgcaacgacgcgcagcgcgccgccggtttgcgcacggcgttgagcgaactggcgttgatcctgcgcgagtacgggattctcggtttcatcgagcccctgggcttcacggtatccgctctgcgccgcaagcgcgtggcagtggatgccatcaaggccatcggtggcctggatgtattccgggtggtgcacgacacctttcaccatcacctggccggcgagcatgagttcttcccggaactgaccggcctggtgcatatctccggagtggaagaccgcgaggcgccgctggactcgatccgcgacggccaccgcgtgttggtgggcgaggacgatatcctcggcaatgcggcgcagatcgagaccttgctgagcaccggctacagcggctatttgtcgttcgagccgtttgccgaaagcgtgcatgggttggcggatatccggcaggcgttgggcagcagcatggcgtacttgcaaaagcccctgccataacgcgatcaaaatgtgggagctggcttgcctgcgatagcggtctatcagttgcacatgtattgcctgacataccgctatcgcaggcaagccagttcccacactggatcggtgttgaacccttcaattgcagtcacacaaggtgcaagtaatgaccacaacacgattgaccatggcccaggccctggtgaagttcctggacaaccaatacatcgaagtcgacggcgtacagagcaagtttgtcgccggcgtattcactattttcgggcatggcaatgtgttgggcctcggccaggccctggagcaggacagcggcgacctggtggtgcatcagggccgcaatgagcaaggcatggcccatgccgccatcggatttgccaagcagcacctgcgccgcaagatctatgcgtgcacggcctcggtcgggccgggcgcggccaatatgctcaccgccgcagccaccgccaccgccaaccgcatcccgttgctgttgctgcccggcgatgtgtatgccagccgccagcccgacccggtgttgcagcagatcgagcagttccacgacctgagcatcagcaccaacgacgccttccgttccgtgagcaagtactgggaccgcatcaaccgccccgagcaactgatgaccgcggcgatccacgccatgcgcgtgctgaccgacccggccgaaaccggcgcggtaacactggccttgccccaggatgtacaagccgaagcctgggactaccccgattacttcctgcaaaaacgcgtacaccgcatcgaccgacgcccggccacccgcgccatgctcgatgacgcgctggcggcgtttggtggcaagcgcaagccgctgatcatttgcggcggcggggtcaagtactccggcgccaaccaggcactgcaagcctttgccgagcggttcgatattcccttcgcggaaacccaggcgggcaagagcgccctggtgtccagccatacgctgaacgtcggcggcatcggcgaaaccggctgcctggcggccaacctgctggcgcccgaggccgacctgattattggcatcggcacccgttataccgacttcaccacctcgtcaaaatcgctgttcaagcaccccgaggtgaagtttctcaacctcaatatcagcccagccgatgccttgaagctggacggtgtgcaagtgctggccgatgcaaaagtggcccttgaagcactggccactgctctgggcgattaccgctcgggctggggcgagcagatcgccgacgccaaggcgcaactcgacgccgaagtggaccgcgtgcatcaggtgcaatacctgggtgatgagttcgtccccgaagtcgacgaccacctggaccgtgccgtcctgcgcgaattcatcgaactgaccggttcgtgcctgacccaaagcgcggtgctcggcgtgctcaatgcacgcctggccgatgacgcgatcattgtggccgccgccggcagcctgcccggcgatttgcagcgcgcctggcgcagcaagggcgtcaacacctaccacgtcgagtatggctattcatgcatgggctatgaaatcaatgccgccctgggcgtgaagctggccgagccaggcaaggaggtgtacgccctggtcggcgatggctcctacatgatgctgcactcggagctggccacctcgatccaggagcggcgcaagatcaacgtggtgctgttggacaacatggcgttcggttgcatcaacaacctgcaaatcggcaatggcatggacagcttcggcaccgagttccgctaccgcaaccccgagagcggcaagctcgacggtggcctggtgccggtggatttcgccatgagtgcggcggcttatggctgcaagacctacaaggtcagcacgctggaacagctggaagcggcgttggccgatgcccgcacgcaaaccgtctccacgctgatcgatatcaaggtgctgcccaagaccatggtccacggctacctgtcgtggtggcgggtgggggtggcgcaagtgtccaccagtgagcgcacgaatgcagcggcaaaaaaactcaatgaacacctggccaaggcccggcagtactaacaacaagaggagtgtttgtatgtctttgaagcttggagtgatcggtacgggcgccatcggccgggaccatattcgtcgttgcagccaggccttgctcaacagccaggtggtggccgtcaccgacatcaaccttgaacaagccgcccaggtggtggcggatttgaagctggacgccgaggtgtacccggacggccatgcgctgatcaactcgccagaggtcgaagcggtactggtgacgtcctgggggccgagccatgaagaatttgtgctggccgcgattgccgccggcaaaccggtgttctgtgagaaacccctggcggtgacggccgaggggtgccgcaacattgtcgaggccgaagtggcccacggcaaacgcctggtccaggtgggtttcatgcgcccgtacgaccaaggctaccgcgccctcaaggcggtgatcgacagcggccagattggcgagccgttgatgctgcactgcgcgcaccgcaaccccacggtgggcgagaactacaacaccggcatggcgatcaccgacaccttgatccatgagctggacgtgctgcgttggctgcttaatgacgactacgtgtccgtgcaggtggtgttcccgcgcaagaccagcaaggcgctggcgcacctgcgtgacccgcagatcgtgctgctggaaaccgccaaaggcacgcgtatcgacgtggaagtgtttgtgaactgccaatacggctacgacatccagtgtgaagtggtaggggagagcggcatcgccaagttgccggagccgtcccaggtgcaactgcgcagcgaggcgaagctgtccaatgcgatcctgatggattggaaggatcggtttatcggtgcctatgacgtggagttgcaggcgtttatcgacagcgtgctggccgggcaagtcggcgggccgtcggcctgggatgggtttgcggcggcggtggcggcggatgcgtgtattgaagcccagggcagtgggcagattgtgaaagtcagcctgccggatcgcccgcgcttctacggctaactcactgaagaaatgtggttaacactgtgggagctggcttgcctgcgatagcggtctatcagtgacaaattcattgcctgacacactgctatcgcaggcaagccagctcccacagttgattgggtttccaaatcaattccggagttgaacatgcgaatcggactagtgggctacggtcacggtgggcgcttttttcatgcgccgctgatcgccaccctgcctgacgccacctttgtcggcgtggtgacgcgttcacccgaacgtcgccagcaattgagtactgatcttcccggtgtcaaagccttcgactccatcggccagatcgtcgaagccggcgtcgatgccctggtgatttcgaccaccttgaaaggtcggccggccctggtgctggaagccatcgagcatggggtggcggtggtcagcgacaaaccttttgccgccaacgccgaacaagcccaggccctgattaccgctgccgagcgccagggctcgttgctcagcgtctaccagaaccggcgctgggattcggactacctgaccctgcgcaaactgatcgacgccggcgccctgggcaccattacccgctttgaatcccgcgtggagcgctacagcccgcaggccgtgggcattgccagcggtggcggatggctgcgcgacctgggcagccacctggtcgaccaggcgctgcaactgttcggcccggtggagcgggtgttcgcccaattgcactacacccctgaacatcccacggtagaccacggcttctttgtctccctcacccacgccaacggcgtgatttcgcacctgtggggcaacgcgttgcagaacagccaggcgccgcgctttcgcgtcagtggcagcctgggttgctacaccgtcgacggcctggacggccaggaagaagcgctgctggccggcaagtcgccgaaaaccgaaggcgaacactggggcgctgaggagcatcgacgctggggctggtttgaacaagggccggagcgtgagcgggtgccgtcggagaagggctgctggaaccagttctaccgccagttgcaagccgccgtgatggggcaggggccgctgcccgtcaacgcctatgacgccctggaaaccacccgtatattagacgccgcacgcctgagcgccgagcgccagcaggtggtttcgacaaaaatagaataaaattctaaaacaggttgatatggaaattattttctaatacagtcttttccaggttgcataaagtacgtcccggaacctacgggcgactcaacaaaaacaagatcaaaaacaaccaggtaccgtcagatgaaaatcttcaacgctgtactgcgagttttacgccccctccaagcgccacgcggactgccccgcgcccggccgttctacttctccttcctgaatgtgctgtgcgtcgaaaaccagggcgcgctggtgtgctgcattccaggcgcgccggtggtgcgactgacagccgagtcctgatcaacgcaacgtcgaaaaaaactaacaagaaagtggagacagaccgttcatgaagaccccgatccgttttaccgccctggccttgtccatgctgctggccagtggcgttgccggcgccgccgatctcaaggtgggcgtgacgatgtccgcgttcgatgacaccttcctcacctacctgcgcgaagacatggacaagcaagccaagtcctatccaaaaggcgatggcgtgcaactgcagttcgaagatgcccgcgccgatgtggtcaagcagttgagccaggtcgagaacttcatcagccagaaggttgacgcgattatcgtcaaccccgtcgataccgcgtcgaccaagaacatcatcagtgccgccaccaaggcaggtattccgctggtgttcgtcaaccgtcgccccgaccagaaagacctgcccaaggacgtggtggccgtgacctccgatgacgtcgaggccggccgcctgcaaatgcagtacatcgccgaaaaactcggcggcaagggcaaggtcgtgatcctgctgggcgacctggcgaacaactccaccactaaccgcacgaagggcgtgaaggaagtgctggccaagtacccggacatcaagatcgagcaggaacaaaccggaatctggttgcgtgacaggggcatgaccctggtcaacgactggctgacccagggccgggagttcaatgcggtgctggccaacaacgatgagatggcgatcggcgcgtccatggccctgagatcggctggcaaggaaaaaggcagcgtgttgattgccggtgtcgacggcacgcccgatggcttgaacgcgatcaccaagggtgacatgaccgtgtcggcctttcaggacgccaagggccaggcggtaggttcggtggaagcagcgcgcaagatggccaagaacgagccggtcgagcagaacgtggtgatcccgttccagttgatcaccccggacaacgtcaaagacttcaagtagccccgacataacaacaaaagctggcagggcggttacggccgccctgcagatggagtacctccctatgcttgctcaagccgccacgtctcagcccgccgcccaccgggcgctggcgctggacgaaccttacctgctggaaatcctcaacatcagcaaaggctttcccggtgtcgtggccctggacgatgtgcaactgcgggtgcgccccggcacggtgctggcgttgatgggcgagaacggcgcgggcaagtcgacgctgatgaagatcatcgccggcatctaccagcccgacgccggcgaaattcgcctgcgtggcaagccgatcacctttgaaacgccgctggccgcgcaaaaggccgggatcgcgatgatccaccaggaactcaacctgatgccccatatgagcatcgccgagaacatctggatcggccgcgaacaactcaacagcctgcacatggtcaaccaccgcgaaatgcaccgctgcaccgccgagctgctggcgcgcctgcgtatcaacctcgacccggaagaacaggtcggcaacctgagcattgccgaacggcagatggtcgagattgccaaggcggtgtcctatgactccgacatcctgatcatggatgaacccacctcggccattaccgacaaggaagtggcccacctgttttcgatcattgccgacctcaagtcccagggcaaaggcatcgtctacatcacccacaaaatgaacgaagtgttcgccatcgccgatgaagtggcggtgttccgtgacggccaatacatcggtttgcaacgggccgacagcatgaacagcgacagcctcatctcgatgatggtcgggcgtgagctgagccagttgttcccagtgcgcgagacgccgattggtgacctgctgctgtcggtgcgcgacctgagcctggacggcgtattcaaagacgtatcgttcgacctgcacgccggggagatcctcgggatcgccgggctgatgggctccgggcgcaccaatgtggcggaaactatttttggcatcaccccaagctccagcgggcaaatcaccctggacggcaaggcggtgcgcattaccgacccgcatatggccatcgagaaaggctttgcgctgttgaccgaggaccgcaagctcagcggcctgttcccgtgcctgtcggtgctggagaacatggagatggcggtgttgccgcactattcgggcaacggctttatccagcagaaagctttgcgcgccctgtgtgaagacatgtgcaagaaactgcgggtgaaaaccccgtccctggagcaatgcatcgacactttgtccggtggcaaccagcaaaaggccttgctggcgcgttggctgatgaccaacccccgcttgctgatcctggatgaaccgacacgcggcatcgacgtgggcgccaaggccgagatctatcgcttgatcgccttcctcgccagcgaaggtatggcggtgatcatgatttcttccgaactgcccgaagtgctcggcatgagcgaccgggtgatggtgatgcacgaaggtgagctgatgggcaccctggaccgcgccgaggcgacccaggaaaaagtcatgcagttggcttccgggatgaccgcagtccactgatctacagaataagaaggtgatgggttatgaacgcaataacagacaacaagccggcaaccgcaccggtcaagaaccgtcgacgcatgcccaccgagctgagtatcttcctggtgctgatcggtatcggcctggtgtttgaattgttcggctggatcgtgcgcgaccagagctttctgatgaactcccagcgcctggtgctgatgatcctgcaggtgtcgatcattggccttctggccatcggtgtgacccaggtgatcatcaccacgggcatcgacttgtcgtccggctcggtgctggcgttgtcagcgatgattgctgccagcctggcgcaaacctccgacttttcccgggcggtgtttccgtccctcaccgacttgccggtgtggatcccggtggcgatgggcttgggcgtggggcttttagcgggggcgatcaacggcagcattatcgcggtcaccggcatcccgccgtttatcgcgaccctgggcatgatggtctcggcccgtggcctggcgcgctactacaccgaaggccagccggtgagcatgctctcggactcctacacagcaatcggccatggcgccatgccggtgattatcttcctggtggtggcggtgatcttccacattgccctgcgttacaccaagtatggcaagtacacctacgccattggcggcaacatgcaggcggcgcgtacctcggggatcaacgtcaagcgccacctgatcattgtctacagcatcgccggtctcctggcgggcctggccggcgtggtggcctcggcacgtgcagcgacggggcaggccggcatgggcatgtcctacgagctggacgcgattgccgccgcagtgatcggcggtaccagcctggccggtggagtagggcgcatcaccggcacggtgatcggcgcgctgatcctcggggtgatggccagcgggtttacctttgtcggggtggacgcgtatatccaggacatcatcaagggcctgatcattgtggtggcggtggtgatcgaccaataccgcaacaagcgcaagctcaagcgctgagtacctgccccttgtaggagcgagcttgctcgcgaaagctacaaagataacgcgggctatctgattgaacgcggtgtccttgaatgcttcgcgagcaagctcgctcctacagggggccaggccctttcaaccgtttgtcttctatatagctccataacactgaatttcttgctataaacgcactccgatgaccattcgccaagcccgtcctggtgcttttgggggttgatcgggaaaaaatgcctgtcttttcagttgctgcgccctcaagtcggccttagactgccgcccctcgtaaattgagtgccgggtggcgcttgaaatggacggcgcccttccgnnnnnnnnnnnnnnnnnnnnnnnnnnnnnnnnnnnnnnnncggaacgctcccttattcgccttaatgcacgtattttttatagagaaatcaatgacaaaggaaaagttgctggccatgccggcggatgactacatgaatgccgaacagcacgcttttttcgagaagttgctgcaagacatgaaagtggaacaccacgagcgcattgagcagaaccgtatcgccattgaaagcctggacaccccggccgacccggctgacgcggcttccgtggaagaagagcgcacctggttggtgaacgccattgaccgcgaccagcgcatgctgccgcaacttgagcgcgccctggaacgcatcaaggaagattcctttggctggtgtgacgacagcggcgagcctatcggcctcaagcgcctgctgatcagccctaccaccaagtactgcatcgaagcgcaagagcgccacgagcagatcgacaagcaccagcgtcaagcctgatgcggtgaatggggcggctctcgagctggccgtcccggtctctacattgttgctgtttatgcaatgaagctattccgaagatagctttttccaactggaataaaaccgtagcatggccaacattgttagccagctaactaatgctgcggagaagctccatgcaaaacaaagtcgatgtggccgtgatgatcggcagtggcgtgcctgaaaccctgcgtgccctgggccagcgcgcctgctgggtagtgttactcaacggtgagcagcgcggcaccgcgttcgccagccgggatgaggcgcaggaatgccaggctgcctggcaagcgctgttgcgcagtgaagcgtccgacagcctgcattgatcacatgcggggaggctcatgcagcagtgcattgaggtcatccactgcgggcgcccattctgcgtcgacatgcaattgctccctgaggaagttcgcctgctgttcgctccagaacggcgcgtcgatgagttttacatcatcgggcaggcgatgttcggcggtgaaacgctcgatagcttcctggctggaatccaggcccagttgttcgaacagggtttcaagggttggggtcgtggtgtccataacgttctccatgcgggtttatcgtcatgcatgtgaggggtcgggggacgccagagttctatcggattgtcaggaattgagcgcgccgcaatctacggcggctttcagcgcctgggccgcttctttgcccgccacggcagctgcgtcggcggttttgaaccagcggtctttttccacctggtgcgcggtgaccttgttcagcggcggtttggcccgcatgatgatgaccgcttgaaactcgccgtctacttccctcgcatcaccgtggataataaattcgccaatatcaaattccgtcacgtatagctttcccttcaaggtaactgcgttgatgaaacctgacccgcagggggcaaacttcaatggacgggccagtatggcagttgttgaggggcggtggcgcagtaaagtcagccaggtgacgaaacgacccgaccgcaacgagcgtgcagctttgcttccagagtcttggccagttcacaggccttgttgtgatcactgcgaaaacccttgatcctgccgctgggcacttcaagaatatgaaaaaagttctttcctgccggtacaacttggtacagcactgaattggagtacccgtcaaggttaagcaagcagtagtattggcgttcgtctggacatgatgaacgagtgtggaaggacgtagcgtcgtgttgacgtcgttgcatgctcagctcctgtcgatcgatcttattggcctgtggttagcatttgcggtggttttgaccccggttgctgttttagtattgtcgtcggcagttcgcgactggttccatgtcttgcgtattttttgtgttgagtgtcggaaaactgcacttttaatcgggttattctctgaagttggtcgacctgtattctcgggtcgttgaacctgtgatttgctgtaccaccggatgaccttgcatgaggtccgccgcagatgtctgtactagccttacgcgttctcttcagttttttaatgactctatgatcgtgtcgtaacggctattttttgtgctgctcgcttcggcggccagcgcttttttgatgtgggggcgtttccttggcagtcagtaatctggatatgcacgcgttattcgtgctgggtgatttgcgcgctaagttggtcaagcagtttcaatctcggtttgtctacatcactgaacagacgccggaaggtatttatatcgccgagatcgatactgaaacggcgctggtcgtggatgacaaaccgcgcctggaactcaaagtgggcgaccattttcgcgcttcggtgttgcccagccgcgagggtggcaagttcgaattgaggtttcgcgacatcaagttgaccgtgtacggcctcggcgactatgcctttgtgtcatcgaacgaaggccagggtattgtgttcaaggaaggccacagcgtgatgctggtattcgccgcccatgagcaattgcaagaagggttgaccaaaaccctgaaggccgtgacgggcaaagccgccaaatggcgcaagggtgagctggtgaccttcaaggccagcgagtaggcgataaatacgctgtgcatctttgtcttttggaacctctactacagttgagttgacttaactattcagaggcttcgcgcattcgcagcaaagccgttcgccatgactgcgaaaacgcgaggtgcataggcatgaaaggattgaagtcactgctggcggcgggcctgacgaccctgactctgtcattgccggtatcggctgcccaggcaccggtgcattttgccgacctgaactgggaaagcggcagcctgatcacagaagtcctgcgttttatcgtcgagaagggttatgacctgcccaccgacaccttgccaggcaccaccatcaccctggaaaccgccctggccaagaatgatatccaggtgatcggcgaggagtgggctggccgcagtccggtgtgggtcaaggcgcaagccgaaggcaaggtgacgggcctgggcgatatcgtcaaaggcgccaccgaaggttggtgggtgccggaatacgtggtcaagggtgacccggcaaaagggctcaaacccctggcaccggacctcaaaagcgtacaggacctggcgcgttacaaggacgtgttcaaagaccctgagtctccaggcaagggacgctttctcaacagccctattggctggacctccgaagtggtcaacaaacagaagctcaaggcttatggcctggacgacagctacgtgaacttccgcagcgggtcaggcgcagcgctggatgcggagattgcctcgtcgattcgccggggcaagcccgtgctgttctactactggtcgccgaccccgttgatggggcgctacaaattgatccagttggaagaaccgccatttgatgcagatgcgtggaagaccctcactgacgcggacaacccgaacccgaagccgacgcgctcgttggcgtccaagttgagcattggcgtatcgacgccgttccagcaggaacatccacacattgccgagttcttcgagaaggtcgagtttcccatcgagccgcttaacaaagccttggcgacgatgagcgagcgccatacgccccctcgggaggtggcccaggcgtttctcaaggaacatccacaggtgtggaaggcgtggttgacggacgatgtggcgcagaaggtcgaggcgagcctcaagtaagcgccagtcttggtatccagtgaagatcaaaatgtgggagctggcttgcctgcgatgaccgagtgtcagacaacctatttttatgctgacccaccgctatcgcaggcaagccagctcccacatttgattgtgtttgagctttaaaatttggtctgtacagccagctcaaaggtcctcggtgaccccagatagtacgccggcgacacatgggcaaactcggcatacacctcgttggtcaggttacgcacccgcccggtgaccgaggtgttcgcatccagcttatagcgcaggaatgtgccaaacagcgtatacgccggcacggtctgggtgttggcattgtctgcatacacctgggcgacgtagcgcgcatccacgccaccttgccaatcctcggcaaagtcgtaggtcagccagaggttgcccacacgcttgggcacgttggtcggcgtgttgcccttgcgcgacaccacggcgccgctggcggttttttcgttgaactcatcgtactgcgcgtccacccaggcaaagttgccttcggccagtagtttcggtgtgatatgcaacgagctggccagttcgatgcccttggacgactgcgcgcccaccgggatgctgctggtcgggtccagcgggtcggtgacggcaaagtccttgcgttcgatcttgtaggccgcgaccgtggcggagcccctaccttgcaggtaatcgaacttgctgccgatttcccattgcttgccggtggacacgtcgaacacttgggtagtggtattgggctgttcgacggcggtgctgtattgcacatagacattggcggacgggatgaactgataggtcaggcccacccggcccgttaccggttcccaactgcgcttgaagtgccgtgggttggtggcggtgagggtgcggtggttggtcacgtccaggtcgatggcgtcatagcgtaggccggtcagcagcgagagcttgtctgtcaatccaagacggttttccacgaacagcgccttggtggtcacctggttggttttgtccttgacgaaacctggctgggtaccgggaatatcatagaagtgccctgggtcgtagtggttcgggtccacgctacttttgccgggcacgttcaaggggctgttggtggtgctgttgaccttgtactcaaaaccgcccgaccaggtggtggcaaggccgaacacgctggagtcatggcgcagttcgaactggttgccgttctgctcgccctggtgccgcacctgataggccgtcgagcggttcaccgcgctgttgttggcgttgtactggtaagtctccaggttgcggtagtcgcgctggctgtcgaggtggtaaagcgtgttttttagcgtagtgctgtcgttgatccggtagtcgatgatcgaccgtgcccagatcgtgcgttgctcataacgaccgtcggcaacgttgtagttattgaagcggttgtgcttgtcgatcttcagttcaccggccttggggttgagcaccggcgtgccccagtacgggctgtcttcatgttcgtcctgatactcaagcgccagggtgtgggacaggttcggggtgaggtcgctgagcagggagaatgcgacgctccaggcatcgcgctgatcgcggtcgatgtagctgtggttggtgttgcggctcacgtccaggcgggcgtaatgctgtacgtcggcgccgggttcggtcagcgcatggttgaggccgaacgccatgccggcggtgtcgtagctgccatagctcagttggccttcgacggcctgttcctcgcgggttgccagcttggtcacgtagttcaacgagccacccacggagcctgcgccgttgatcaaggaggaggggccgcccaccagttcgacgcggtcgtagatccacgcatccaccggccgcgccaggcccgtggcgacattgatgccgttgaacatctgggtgatctggctgctgctaaacccccggtacgagacaaagccgccaaaaccgggcggggcgctggcgttgacaccgggcagggtattggccgcatcgcggaaggtcttggcgccgtggcgctcgatatcgttgcggttggcgatggccactgacgccggggtttcccgcacgctcaggcccaggcgcgaggccatgccgctgggttggtccagggccaggcccggctcggcactttgctcgccatcaatggtggtcggcgccagttcaagggctgaggcgcaaacaggcaggcagccgaacaggcccgccaacaggggtaaatgtttcatggttgaatcctgaaaacttggctcgaaaacaacgcacagctacccgtagtccttacggcaacggggcgatgcagatcagaaagcgcagggatcaggcgacggcaggtggcgcgcggggattagccgcaggccaggtgaagcgggcgggaatgtcagcagcaagcaccaccgcagcaggcggcgcatggggttgtggcagcaccgccacgttcaggtgggaattgagcgccgggcccatgccgccggtagagcacagcgggcaaccaaatgccttggatagcgtgggcaggttttcgtctgtcgagttgctgggcagcggcgcctgggtacgtgggtcgaccgtacagaactggccgctgatgccgttgagctgcatccccaccatctgcccatgaccaatgctgcaggcgaacacattgaacaggacgcagcagtaaagcatccaggcaatgagtgagcggtcggcacgggcgagtttcatggggtggcactttatcatcagcgaccgacgaaatgcctgcaaaaaatctcagggcgactatcctcattcgcacatttttgtggagcgccgaccatgagctttgtcattgcgcgatggatcgtcggggtatttaccttcatcagcatggtgcatttgtattgggctgcgggtggcaagctcggcagcctggccgctatcccgcaactgcccggagagttcgccagcgggccgaggccggcgttcaaaccgtcggcgctgggcacttttctggtggcgatggggctggtggcgattgcnnnnnnnnnnnnnnnnnnnnnnnnnnnnnnnnnnnnnnnnagggaacagctcgctcagcttcatcgccagcatcatgtcgccttcggcgcgcagcttgccgcccatgaacgcctgcatgccgtcggtggaaccgtcgacgatgccttccagggtttcgctgtccatcaccagagtgacctgagcgtcagggttttcgccttctttgagttcgcaggtcttgtccttgaccaccagcgagaaattcttgctgtcgtcgatacggaaaccgaacaccaggtccaagccttcggcagcgcttgggttgaatttggctttcattgcttctacggctttagctacgtcagtcatggtttcgatccttaagggtagagtccagtgaccttggggtcacggttggccgcagttcatcggaaagtgatgagctgcggcgccttcaacagttgcaagtgggcgtgactgttgaaggaagccagtgccacctcgcgaccacggaacttcagttggttgagcgaggtgttaacaatttgccagttcatttcgaaggcctgggcggcaggcattcgggtaatcaggtggagcagggcggtgatggtgccgccggaggtgaatacggcgattttgtcggtgtggttcgcggcttcaaggatgcgctgcaagccaccctggacccgctcgacaaaccccagccagctttccagccccggcggatcataggtgccggccagccagcgttcgatgatcagggcgaaaatgcgctggaactcgctgcggttctgcgggccattgcgcaggatatgcacggcattcggttcactgctgagcaggtcgggcaacaggccccgaataatcgcttcgccgtcgaactcgttgaatgcgctgtcggtttccagcgccggcaccggcaaacccagggcgctgtactgatcgaacgtggcgctggcggtgtgctgctggcgacgcaggtcgccggcgatgcagcggtcaaacgcaatgcccaggtctgccaggtggcgaccgagcacttgcgcttgttccacgccaatgggcgagaggacgtcgtagtcgtctgcaccgaaggaggcctggccatgtcgaatcagataaatgctgcccacgtccgttttcccggtacgttgaaagtctggcgaggttatgaggatgcctgcgagctgtcaatggaaaaacatacgcttgttttaaaagcgcgttggagcccgcctgctggcggtttgatcactggctccttcgcggtggcgtcggtatgctggggccatccgcgcctggcgcagtgctttttttaaggagacatatggattttctggccgaatacgcgagctttctggcgaagaccgtcaccctggtggtcgctattctggtggtactgatcagctttgcagcactgcgcagcaaaggtcgtcgtaaatccgccggccaattgcaggtcagcaagctgaatgatttttacaagggattgcgcgagcgcctggagtcgagcctgctcgacaaagaccagctcaaggccctgcgcaagtccgaaagcaaagccgaaaagaagaaagacaagaagaagcccgaggccaagccacgggtattcgtgctggatttcgacggtgacatcaaggcctcggccaccgaaagcctgcgccatgaaatcaccgcgctgctgagcctggccacgcccaaggatgaagtggtgctgcgcctggaaagcggcggcggcatggtgcacagctatggcctggcctcttcgcaactggcgcgtatccgccaggccggcgtgccattgactgtgtgcatcgacaaagtggcggccagcggcggctacatgatggcgtgcatcggcgagaagatcatcagcgctcccttcgccattctcggttccattggcgtggtggcgcagttgcccaacgtcaatcgcctgctgaaaaagcacgacatcgactttgaagtgctgactgccggtgaatacaagcgcacgctcacagtgttcggcgaaaacaccgagaagggccgggagaagttccaggaagacctggacattacccaccagttgttcaagaacttcgtttcgcgctaccgcccacagttggcgattgacgaggtggctaccggtgaagtgtggctgggcgtcgccgcactcgacaagcaactggtcgatgagctgcaaaccagcgacgaatacctggccaccaaggccaagaccgccgaagtgttccacctgcactatgccgagcgtaagagcctgcaagagcgcgtaggcctggcagccagcggttcggtggaccgggtgctgttgacctggtggagccgcttgacccagcaacggttctggtaacccagtactgaaaaccaggtaatcccttgtcgatcgttcccacgctccgcgtgggaatgcctccagtgacgctctgcgtcaccctggcgtaggtggggcgcggagcgtccaaggctgcattcccacgcggagcgtgggaacgatcatgtcaggtcaaacggggtttaatcgagtccgccaattgcgtaaggatcaggcagcacgacaccgccccggcatccagaacgccgagggaacgctcgcctaagcgactggcccggccaatcttggccaccaggtctttggtcgaatcccgcccttgagaagcagcgcttttcatcgcatcgagtgcatcgttgaacgaagcccccgacgcctgcgcccgttcaaaggcttccaccgccggaatcaaggtatccatcaagcacttgtcgcccacgcccgcttcggtgatgtcctgcaatgaggtcaagccgccgcgcagcaggtgggcgaaggtggcggcgtcgatgtcttcacggccgcgcacttcgtcggccatgccgataaacaggctgccatacaacgggcccatggagccgccgatgccttccatcaggctcaaggtcagttcgtccagggcttcggccagggtcagttggtggccttcgatcgtgcggccgcaatgggcaaagcccttggccatgttgatgccatggtcgccatcgcctatggcgccgtcgacttcgctgaggtactcacggttggccacgatgacgcggaccaggtcggcgacgatggcgctgccatcatgggtggaaaaatgctggctcatggttcactccgcctgggtcatgccgatggagcggcagggttggtcgatcagggttttcagctcggcgtcgaggccgagcagggtcaaggtcacgcccatcatttccagggaagtgaagtagttgcccacgtagcaacggtgaatcttcaagcctttggctttgagctgtttttccacctcggcgtagaaaatatacaactccatcaccggggtggcgccgaggcctgagatcagcaccaccacgctgtcgtcctggctgaaatcgcggtcggcgaggatcggtgccagcatgcgctcggccatggcggcggccggttcaatcgggatgacttcgatgcccggttcgccatgatggccgatgcccagctccatctggccgtcgggaatctggaaattgggcttgcccaccgcggcgatggtgcagggcgtaaggccgataccaatcgagcggcagtggtcgacggttttctgcgccacccgaatcacgccgtccaggtcgtaatgctgggcagcggcggcaccgccgatcttccacatgaagatttccccggccacgccgcgacgcttggcgatgtcggccttgggcgcggacgccacgtcgtcgttggcgaccaccgtgcggatgcgcgtgtctttgctggcggccattttcatcgccagcttcacgttcatgttgtcgcccgcgtagttgccatacaggcaggcaacgcctgcaccatggtcggcggcgcggaaggcgtcgaaaaagcttttggcggtgggcgaggaaaaaatctcgccgacggccaccgcatccaccaggcctgggccaacatagccgaggaacgccggctcatgcccggagccgccgccggtgacaatgccgacgcggccttgggcggatggcctggccttgacgatgacccgtgggttgctctcgtactggcgcagttcggggtgcgcgaccaggatgccgcgcagcatgtcttcgaccacttggtcgggatcgttgatgactcgattcataacgcgggttcctgttgtttttattaactgtaggagcgagcttgctcgcgaaaaacgccaacgatgacgcgggctgtctgattcagcgtggcggccttgagttcttcgcgagcaagctcgctcctacagtaaaagcggttgagtaaactttcagggttcgagcacaaccttcagcgatttatcgccgcgctccatcactgcaaacgcttgcttgaaatccgccagcgcaaacttgtgggtcaccacgtcgcgcatatcgatcttgcggttgccgataaagtcgatggccctggggtacatatacggccccaggtgcgagccaaggatatccagctccttgcggtcgccgatgatcgaccaatccaccgtggcctcgtcattgaacacgctgaattcgacaaagcgtcccagcttgcgcagcatcgccaggccctggttgactgccttgtgatgcccggtggcctcgatatagatgtcgcagccgtagccgtcggtgatctcgcggatcttcgccaacacatccacctcggccgggttccacacttcatcggcgcccaggcgcagggcgagggcggcgcgttcgggtttcatgtccagcacgatgagctttttggggttgcgcagccgcaccgcgccgataatgcccaggcccagggtgccggcgccggcgactaccacgatgtcgtcatggtcgacgttggcgcgttccgccgcgtgcagcgagcaggccaagggttcgatcaggatcgcttcatcgggggcgatggattccggcactttgtggatgatgccttccttggtgaagatcatgtactgggccatggcgccctgcacattgttctgaaagccatacaggtcgtgcttttggcacatccagtactggccgtggttacagaagcggcagccccagcacggcacgatctgctcggagatcacccggtcgcccacggccacgccgcgcttctcggcgcctgggccaagggcgactacgcggcacacgaactcatggccggggatcatcggcggcttcacgtagcgcggttgctcggcatcgccccagaacgacggcgcgccgcgataggtcttgatatcgcccatgcaaatgccgcacagctcgactttggtcaggatctcgtcggggccgggggtgggcacgtcgacggtttccaggcggtagtcttccgggccgtggcagaccacagcctgcatggttttcgggatactcggggcgagttgttcaggtgtgcgttcggtgacagtggacatgacaaaacctcacgacataacgatgaattactgaatgctgtagccgccgtcgatcaccatgttggcgccggtgatcatctgcgcggcatcgctgagcaggtacagcgccagcccggcgatttcttccggctgggcaaagcgacctgccgggatctgcaatttggcccgctcacccacctcgccggcccaggcttttttacccagggcggtttcgacgatggtgggggagatagcattgacgttcacctgcggcgcccactccatggccaatactttggtcatgccgacgatggcggctttgctggcgcagtaggcgacgtgacggtccaggccaatcacggcggcctgggacgccaggttgacgatgcgcccgctgccctgggcgatcatgtgcctggcgcaggcctgagccatgaaaaagctggccttgaggttgatgtccagggtggtgtcccaggcgctttcgctgacctcgatggccttgtccagcagcaccacgcctgcgctgttgatcaggtaatccaggcgttggaagtgtgcgaacaccttgtcgacggtcggttgtatctggtcgatctttccgaggtcgacggcaatgcccaggtgcccggcacccaggctagcggccacctcgaccacggccgggtcacggtccagcagcgccacccgggcgccgcgttccgccagcaaggtggcgcaggccaggccgatgccggcggcgccaccggtgatcaccgcgcaacggccgctgaggtcgaaggcttggttccagaaaccagacatgaatgactcctcgttcccacgctctgcgtgggaatgccgcgtggaacgctctgcgttccgatgttaagtgacgcggagcgtcacgggatgcgttcccacgcggagcgtgggaacgatcaaactacttaccgccgctgacttgcttgtacagcgcatccgcattggcattggtcaccggcacccagggcaggatgtagttcttggccgtgccgtcggcccatttcaggtccttggcatagcgctcccaaatcaccgattgcggcttgtagtcttcgccggccagggcccgcagtgctacgtccagcgcgccttgggactgggcctgggcgtcctgcaggaaggtggtgacttcgtcctttttcgccgcctggatcgcatccggcatgccatcgatggaggtgacgggcacgtccttggaggtgaggccatgggacttcagcgcctgcacggcgcccagggccatgtcgtcgttctgagcgatcacaccgttgatgcctttggggtgggcgttgagccagtcttcggtgagggtcatggcctgggcgcggtcccagttggcggttttcttctcaatgatcttgatgtccgggtgtttgcccagcacttccagttcgcccttttcccggtcgatctgcgccgactggccaatcgggccctggatgatcaccacgttgcccttgccattgagcttgtcgaccatggcctgggcctgcagacggccgccttccacgtcgtcgttacccacatacggcacgctggcatcggctactttcgtattggaggcgatgaccaccacgtcgttgctcatggcggccttgacggtgccgacgccggccttggtatcaatcggcacgaacagaatcgcgtcgtagcgttgggtcaccatgttttcgatctggttgttctgggtcagggcgtcgtagttgccgtcgaacacggtcaactgcacggtgccatccttgaccgccgggtgttctttgagctcgcggacccagttctgcatgaactggcccttgaggccatagacggctgcgccgatcttgtaggtcttgccatcggctgccagggcaatgctgctggcgagcagggagagggccgccgcggcggccagggtggtacccagtttcataagtagaactccggttattgttatgggtcgttcttcagcgtttcttcttgcgccatacgtcgatcaggactgcgaacacgatgatcaggcccttggcgacttgctggtaataggaggacacaccgagcaggttgaggccgttgttgatcacgccgatcaacagtgccccgaacaaagtgccgacaatgctgccggtgccgccagacaagctggtgccgccgatcaccaccgcggcaatcgcgtccagctcataggaaaccccggcctggggcagggcagaggtggtgcgtgccgacagcaccacgccggccaacccggcgagcaggcccgagaccacgtacaccgagaacatcactttgcgcacgccaatgccggaggtgcgcgcgcttttttcattgccgcccaccgcatacacataacggccgtaggttgtgtagcgcagcaccatccagaaaatcagcgcgaccacggcgaagatgatgatcggcacgcccaccgggccgaccttgccgatgcccagggccaggtaggtgtcgggcaggtcggtgatcgggctgccgtcgttgagaataaaggtcatgccccgggcgatgctgagcatgccgagggtggccacaaacggcgggatcgacaggttggcgatcataaaaccattgaccaccccgagcatcgcgccggcaaacatccccgcgctgaccgccgccaacagaccgtaaccctgggtggcgaccatggcgctgcacaaaccggcgaacgccaggatcgaccccaccgacaggtcgatgcccttggtcaggatcacgtaggtcatgcccacggcgagaatgccgttgatggaggtctggcgcaggatgtccatccagttgcgccaggtcataaagtattcgctggaaaacgccattaccacgcacagcaggataaacaccagcggcaggccaaagcggtcgagggacaggcgcaggcggttgcgcggcgcggcagtaacgggagcaacgatggttttggcattcatgaggcaagactcaacaaggcttcctgggaaagagcggtgtcggtgctgatagtgaccagccggccgcctttgaagacggcaatgcgatcactcaaatgcagcagctccggggcttccgacgacaccacaatggctgcaccgccagcgcgcacgaactggtcgagcaggtggtagatctcctgtttcgcgccttcgtcgataccgcgggtgggttcatcgcagagcagacacaccggctcggtggacaggcatttggcgagcaccaccttttgctggttgccgccgctcatggacgccaccggcagttccagggagctggtcttgatctgcaggcgcttgaccatgtcttcggccagttgcgcttccttgcgtgcgttgatcagcgaccaactcgacaggcgcttataggccgacagtgcaatgttggacaggatgctgccggtcagtaccaggccgctgtccttgcggtcttcggtgaccagcgacatgccggcgtcgatggttgccttgggctggccgatgggcatgggtttgccttgcaaggtaacgctgccggaatccgccacggtcaggccgtagatgcaattgaggaattcactgcgcccggaacccatcagcccgtaaatgccgaggatctcgccacggcgcagttgcaggctgatgtcgtggaattcaccgttgcggctcaggtggtcgacttgcaggcaggtgctggccgcacattcgcggccgaccttgtggtcgatgcgcgtcagttcctggccgacaatgccgcgcaccaggtggtcgcggtcgatatcggccatgcgcccgctttccacaaaggcgccatcacggaagatgctgtagtcatcggcgatctgcgccagttcgcttagtcgatgggacacgtacacgatgccggcaccgcgtgcggtaaggcggcgaatggccttgaacagggtttcggcctcgcgctcgccgatggccgaggtgggctcgtccatgatcatcacctggcagtcatggctgaacgccttggcgatttccaccagttgcatctgcgccacgctcaggcggtgcatggggctggtggcgtcgacgtcgaactccaggctttcgagcagttcgcgggtgcggcggttgagggccttgctgtcgacgatacaaccggcgcggcgcggttcgcggcccagccagatgttttcggcgacggtcatgtaggggatgggttccagctcctgggtgatcatcgcgattccggcggccaaggcgtcactcgggcgattgaactgcaccggtgcgccgttgagcaggatgctgccagcgtcacgctgggtgatgcccatcaggatgctcaggaaagtcgacttgccggcgccattgccgccgcacagggcgtggacgctgccggcgtgcagagcaaggcgcccgtcacgcagggcgggcaccccggcataagccttggcgacatgttcagcctggagcagtaatggcgtggccatcggcgtgtcctcgtgctgtgaattcttattaggtcgcacagtcatgtttcgctgtgatcatatgtgtatcaaatgaaattctgatcagtcaatctctttcacttaaaaggtgtggttctcatctgcgagccgttaattgcctctgtatagggctttgactggcgggtcagctaaatctcgcttgacaggaaggggtgaatgcttgcgaaatgcgtgagagatatttcactaagtgatcatttgatcagtggagccaggcgccatgaacacacctttcccggtggctatcggatgtgatgaagcgggttttgagctcaaagagctgttgaagcgccatatcgaggggttggggtacccggtgaccgacttcggtactcattccatggcgccggtgctgtacccggacatcgccctggccgtggccacggccatcaatgccgggcaacagcgccttggtgtgctggtgtgcggcaccgggattggcatggccatctcggccaacaaggtgctgggcattcgtgcggcccaggcccatgacacctattcggcggagcgggcgcgcaagagcaacgatgcgcaaatcctctccatcggtgcgcgggtcatcggcgcggagttggccaaaagtatcgtcagtgcgtttttggcctcggagttcgaagcggcgcggtccggggccaaggtcgcgcgcatcaatgcgatcgagcgcgatgggcatcagtagtggacggcgcggggcaagagtcgggagaatgcgcctttgacgccgaaacggaagcccgtccccatgagtgacagtacccagcgcatggccagtgatatcgatcagatgaccgaagtggcgatgctctattaccttgagaacgtcactcaggaggccatcgccaagcgctttgacctgtcgcgggccaaagtcagccgcctgctcaagcgtgcgcgcgatgaagggattgtcgaggtgcgcgtgttgcagcacccggcgatgaacaacgagctggagcgggcgttggtagagcgtttcaagcttgaccgcgccttgatcgcggtcgatcacagtgaccccgacacccagcgctccgcggtcgccagcctggtggccaactacctcaacaagaccctgggcgacggcatgatcgttgccgtgggcatggggcgtaacgtcggcgcggtggccgacaacgtgtttctgccggtaacccgcaactgcaccttcgtgtgtgccatcggcggttcgctcaaggccggcgaatacatgaaccctgaccacatctgccgacgcctggccctgcgctttggtggcgagagtgaaagcctctacgctccggcgctggtggccaacccggagctgcgtggggtgctgatcaacaacgatacggtgcgttcgacccttgaccgcgcccgccgtgccgatattgccctgatcggcatcggcgacatgagcgagaacagcaacatggtgcgcatgggctggttctcgccccaggaaatcgcccaggcgcgcctgtctggcaccgtgggcgacatgatgggctatgactttatcgacattcacggccagccggcggtcaacgccatccaggggcgagtgatcggtttgacggtgcaggagctgtttcgcatcccggacgtggtggcgattgccagtgagaacaccaaggcggcggcgaccttgggggcgttgcgctcgggagtgatcaatacgctggcgaccaccgtcaccaatgcgcacaccatcctggcgctggacgatgccactcgtaaaacctgatacagatcgttcccacgctccagcgtgggaacgcatcctgtgacgctccgcgtcacccttgcgcgggtgggacgcggagcgtcaaaggcggcattcccacgcggagcgtgggaacgatcaacaccgaggtgcctgcatcgcaggcaagccagctcccacaagtattggtgtgcttctgatagggggctacaggttttgtaatagttttgcgctgtaggaattttgtatttcaaatgtaggattcaagtccttttgtcatttcaggacttgcatgaacaccctctcggagcctcccagtcgtctttccccaagaccaccgctgtcgctgtttccgctcaaacaccccgtattccgtcaactaaccttgtcccggtcgtacgaccgcactttgccgtgcctggcgttctgaacactttaaagacagagaatttataaatggaatggttagcggatcccacggcctggctcggccttgcgaccttgattgtgctggaactggtgctgggtatcgacaacctggtgtttatcgcgatcctggcggacaagttgccgccggagcagcgtgaccgtgcgcggttgatcggcttgtccctggcgctgttgatgcgcctgggcctgttggcgagtatttcctggttggtgaccctgacccagccgctgttcgaggtgttcgacaagagcttctcgggccgtgacctgatcatgctgttcggcggtatattcctgctgttcaaggccaccatggaattgcatgagcgccttgaaggccatgtggcgcagcacaagggcaacgtggcttacgcaatgttctggccgatcgtcgcgcagatcgtggtactggatgcggtgttctccctcgacgcggtgattaccgccgtgggcatggtcgacgagctggcggtgatgatgatcgcggtgatcgtgtccatcggcctgatgatcgtggcgagcaagccgctgacccgtttcgtcaatgcgcacccgaccgtgatcatgctgtgcctaggcttcttgatgatgatcggtttcgccctgaccgctgaaggcttgggcttccatattcccaagggctacctgtacgcggccattggtttctcgattctgatcgaggtgttcaaccagatcgcccgcgcccgtcgcaagaaatcggcacagggtgtgttgccagtgcgtgagcgcactgcccatgcggtgatgcgcttgttgggcggtcgcagcctcgcggtggaagaggtgggtgaagaggtcgccgacctgctgggtgagccggatgctgcgcagggcccgctgtttgaccgacgtgaacgggtgatgatcagtggtgtgctgcaactggccgagcggccgattcgcaccctgatgacgccaagggccaaggttgactgcattgacctggcggacgacgccgagacgatccgtctgaaactgatgcactcgtcctactcgcgcctgccgttgatccgtaacggtgcggtggatgagcccctgggttttgtgcacaagaaggagttgctcaaggagtacctggccggtaacgagccgaacctggaacacctggcgcgtcgggcgatcaacctgctggagagcttttcgatcctcaatgccctggagcagatgcgtcaggagtccacccacatcgccttcgtgatcaacgaattcggggacttcatgggcgtgttgagcatgacggacattctagagtccatcgccggtgaattgcccgatgccagcgaaatcgaagggccggacattgtcgaggacggcgatggtttccgtgccaatggtgccttgaaccttaacctggtgcgtcagcgcacgggcttcaaggcggtggcgactggggattatcagaccttggcgggtttggtgatgagcctgctcgatcgcctgccggtggtgggcgatagcctggagcatgaaggctggcgtttgacggtggctgaggtagaggagcgtcgagtgacacaggtgcatttgcgccctggcgcgggtcataacgactgaagatgtcctgcacaaacggcgcttgctcttccagagggccgaagcctttgaatttttctactagggcgccattcaggtagatcagcagcgtcggggtgcctgttacgtcagggtgcctcggcgtgtgcgcgcaatcgactaccaggctcacgactctgggatgcttccaggcgtgcagttcgaacaagggccctgcctgcacgcaggcagggcagtgttcggaaacaaacagaatgaataccgggcgtggtgtgttcagtaaccgttcgaacgccttggcgctggaaattctgctcgttgcaacgcccatgatgatccccccttcaagacgcagtcgtttttcccaacgctaagcccgcagatgtgtagcgtctactgtcaaccttcacaggtctgccgtaccgctgcgacccatgagagtgcgcagtaacagcgctgtggggccttgagtagcaagccgtggcaaagatgctgtcacggcgtggaattattccaagcgttatcttgctgatctctaacgactttcaccccagcatatttttccttcaggacctgtggcacactttctgctgtctattccgttgttacataccaagttccggtatagcggaatacacaatccctggagtgcttgtcatgcatcaccgaccttccgtattcaaagcgtgtgtttttctcgtcgttgcatcggcttccctcgccagcgtggtgcaggcggcggacagcaagcttgatgatgtgctcaagcgtgggcacttgatcgtaggtacaggcagtaccaatgcgccgtggcacttccagggagcggatggcaagttgcagggatttgatatcgacatcggccgcatcgtggccaaaggcctgttcaatgacccgagcaaggtggagtttgtggtgcagtcgtctgatgcacgtattcccaacctgctcaccgacaaggtcgacatgagctgccagttcattactgttaccgccagccgtgcgcagcaggtggcttttaccctgccgtactaccgcgaaggcgtcggcctgctgctgcccaacaacagcaagtacaaggaaatcgaagaccttcaagccgcaggcgatgacgttaccgtggcggtgctgcaaaacgtgtacgccgaagagttggtacaccaggcgctgcccaaggccaaggtcgaccagtacgacagtgtcgacttgatgtaccaggccgtgaactcaggccgcgccgatgccgccgccaccgaccagtcctcggtcaaatacctgatggtgcagaaccccggtcgttatcgcagcccggcttatgcctggagcccgcaaacctacgcctgcgcggtcaagcgcggcgaccaggactggctgaacttcgtcaacaccgcgctgcatgaagccatgaccggtgtggaatttcccacctacaaagcctcgttcaagcagtggttcggcgtggacctgccagaaccggcgattggttttcccgtggaattcaagtgacccgcaacaacaggggcgtgcctgaacacgcccccttcaggtgctgccgaccatgaactatcagttgaactttgccgccgtctggcgtgatttcgacaccttgctggcagggctgggcctgggcctgcagttggcgttgctgtcgatcgccatcggctgcgtgatcggcctgttgatggcgtttgccatgctctccaggcaccgcgcgttgcgtatttttgcctcggtgtatgtgacggtggtgcgcaataccccgatcctggtgttgatcctgttgatctactttgccttgccctccctgggtattcgcctggacaagatcccctcgttcatcatcaccctgtcgctgtatgccggtgcctacctcaccgaagtgttccgcgcaggcctggtgaatattcccaagggcttgcgtgaagccggcctggccatcggcctgggcgaatggcggatccgcgcttacatcaccgtgccggtgatgctgcgcaacgtgctgccggcgctgtcgaacaactttatctcgctgttcaaggacacctccctggccgctgcgatcgcggtgccggagctgacctattacgcccgcaagatcaacgtcgaaagctaccgggtgattgaaacctggctggtcacgaccgcgctctacgtggctgcctgttacctgattgccatgctgctccgttacctggaacagcgtttggcgatccgtcgttaaggaagggtttgcatgtacgaatcccccagttggctgcatgaattgtggatcgcccgcgaaacgctttgggctggcttccaggccagtgtggcggtctcggcgctggcgattatctttggcaccctgatcggcatcgtcgccgggttgatcctcacctacggcaaattctggatgcgcgcgccgttccgtctgtacgtcgatttgatccgtggcacgccggtgtttgtgctggtgttggcgtgtttctacatgctgccggcccttggctggcaaatcagtgcgtttcaggccggtgcggttgggctgaccttgttctgtggctcccatgtgtcggaaatcgtgcgcggcgcgctgcaagccattccccgtgggcaacttgaagcgggcaaggcgattggcctgacgttttatcagtccctgggctatgtgctgttgccccaggcgctgcggcagatcctgccgacctgggtcaactcctccacggaaatcgtcaaggcttccaccttgctgtcggtgatcggcgtggcggaattgctgctcagtacccagcaggtgatcgcgcgcaccttcatgaccctggagttctacctgttcgccgggtttctgttctttgtcatcaactacgccatcgaattattcgggcgctacattgaaaagcgggtggccttgccatgaatcaagctcaaaccaacccagcgctgctggacattcgtggcctgcgtaaacaatacggccaggtggaagtgctcaagggcgtcgacctgtccatgcagcgcggcaatgtggtgacgttgatcggatccagcggttcgggcaagaccactttgctgcgctgcgtgaacctgctggaggagttccagggcgggcagatcaccctggacggcgaatccatcggctacagcgatgttggcggcaagcgcgtacgccacccggagcgggtgatcgcccagcaccgcgcaatgaccggcatggcgttccagcaattcaacctgttcccgcacctgaccgcgctgcagaacgttaccctcggcttgctcaaggtcaagaaaatgggcaaggatgaagcggtagccctggccgaaaaatggctggaccgcgtcggcctgctggagcgccgcaatcactttcccggtcaattgtccggcggccagcaacagcgcgtggccattgcccgggccatcgccatgaaccccagcctgatgttgttcgacgaagtcacctcagccctcgaccccgagttggtgggcgaagtgctcagcgtgatcaaggggctggcggaggagggcatgaccatgttgttggtcacccacgaaatgcgctttgcttatgaagtctcggaccagatcgtgttcatgaaccagggccgcattgaagtgcagggcagcgcgaaggacatcttcgaacggccgcagtcgccgcgactggcggaatttctcaagaacattcgtttttaacaaggagcaacttttatgagcattactcgttacggcaccggcagcaccgcaggtggcggccagccacgcccgttcgcccgcgccgtggaagccgatggctggctgtatgtgtcgggccaggtgcctgcggtggacggtgaaatcatcaatggtggcatcattgagcaaacccgccagacgatgcgcaacgtggtggcgatcctcgaagaagccggctacgagctcaaggatgtggtgcgggtgggcgtatggctggaagacccacgggacttctggagtttcaacaaggtgttcggtgaatacttcaccccggaacacgccccggcgcgcgcctgcgtgcaggccaacatgatggtcgattgcaaggtcgagatcgattgcgtggcctacaagaaaaaggcctaactgatcattcccacgctctgcgtgggaataccgccttggacgctctgcgtccgcgcttgtgacgcagagcgtcaccgcatgcattcccacgcagagcgtgggaacgatcatctggaacgggaccgagtactgccatgaccgaagacaccatcaaacgccgcgccaaaggcctggaccgtgcgttcgatatcctcgattttctcaaggaaatcggccagcccctgcgcccgaatgatattgccagcggcattggcagccccaaatccacggtctacgaactggtggcgtcgttgctggagcggcgcatcctggagaccgtgggcaaggacggccacgtgtacctgggccggcagctgtatttcctcggccaggcacacttgcgtcacttcgacctgacccgcgaggccgaccacgccttacaggagatcgtcagccagacccacgaaaccgcgcagatgtgcctgctcaacgggcgcaaatacacggtggcgctgatgcgcgagggccagcggcatttccgtatttcttcggatatcggcgaaaacgcgcccattccgtggaccgcctcggggcgcttgttgctagggcatttgagcgaccagcagatcgtcgacctgatcgaccccgacgatttcatcctgccggacggcctgcgcctgccgctggacacgttcctggcgcaaatccgccaggccagcctcgatgggttcttctccttcgacagtgtggccgacaccttcacccattgctttgccgccccggtgcgcgatgcccagggcatcagcatcgcgaccctgtgcatcgtcgccccccgggccgatgccagcaaaaactaccacgactatcgccgggtactgatcgacagcgccaacagcctggcccggcgcatcaacgaataggagttttccatgtctgccctcaacgccgttgaaaaaggtgccgccgccgtcggtgctcatttggttcgcgatgtcagcctgccggccctggtgctgcaccgtgacgccctggaacataacatccgctggatgcaggactttgtccgcagcagcggcgccgagctggcgccccacggcaagaccagcatgatgcccgcgctgttccagcgccagatcgccgccggtgcctggggcatcaccctggctaccgccgtgcagacgcgtgccgcctacgccagcggcgtgcgtcgtgtgctgatggccaaccagttggtgggcgcgccgaacatggccttgatcgccgacctgctggccgataaggattttgacttccattgcatggtcgatcacccggacaacgttgccgacctgggcctgttcttcgccgcccgtggccagcgcctcaatgtgatgatcgagtacggcgtggtcggtggccgctgcggttgccgcagcgagcaagaggtgcgtgagctggccaaggcgatcaaagcccaaccggcattggcgctcaccggtatcgagggttacgaaggggtgattcacggcgagcacgccatcagtggcattcgcgccttcgccgccagcctggtgagcctggcggtcgagctgcaagacagcggcctgttcgacctgcccaagccgatcatcaccgcatcgggctcggcctggtacgacctgatcgccgagtcgttcgagacgcagaacgccgccggccgcttcctcagcgtgttacgccctggcagttacgtggcccacgaccatggcatctacaaagaagcgcagtgctgcgtactcgaacgccgcagcgacctcaacgagggcctgcgcccggcaatggaagtctgggcgcacgtgcagtcgctgccggagcctggttttgcggtggttgccctgggcaagcgcgacgtggcctacgacgccggtttgccggtgccactcaagcgctacaaggccgggatcgtgcctgcgcaaggggatgatgtgagcgggtgcaaggtcacggcggtgatggaccagcatgcgttcatgaccgtggcgccgggggtggaattgcgcattggcgacattatttcgtttggtacgtcccacccttgcctgacctttgacaagtggcaggtgggctgcctggtggatgagcagttgcaggtggttgagtctctgcgtacctgcttctagaccgcgtcgcggctatcgcaggcaagccagctcccacattcgactgcattcctccagttggaatagggtcaactgtgggagcgggcttgcccgcgatggggccctccagcacacctgagaactttgccatgaacacccacccccacatcgccctcatcggcgaatgcatgatcgaactgcaacaccgcgccgacggcagcctgcaccagagcttcggcggcgataccctgaacaccgcggtgtacctgcgccgcgaactgggcgaggtcggcagcgttgactacgtcaccgccctgggcgatgacagcttcagcgatgccatgtgtgagcattggcacgccgaaggccttggcctggggatggtccagcgcctgccagggcgcctgccgggcttgtactgcatccagactgatgcccagggcgaacgtaaattcctctactggcgcaacgaagcggccgtgcgcgactgctttaccacaccggctgccgagccggtcctggcggccttgccgggctatgacatggtgtatttgagcggcattaccctggcggtgctgggagatatcggacgtgagcgcttactgcaggcgctgatcgaagcccgtcggcgcggcgccaaggtggtgttcgataacaactaccggccgcggctgtgggccgatgtgcaaacggcccgtgaggcgtatcgcagggtgttggtcgaggtggacattgccttgctcaccgaggatgacgaacgcgcgttgtttggttatgaggatagcgagcaggtgtttgcggcgtacccgtcgattgcagaagtggtgctcaagcggggagcggatgcctgcctgattcgttgcgcgggggagcgctttgcggtgccggcgttgaaggtggagaaggtggtggacaccacggcggcgggggattcgttcagtgcggcgtatttggccagtcggctcaagggtggctcgccgcaagaggctgcattggcggggcatcggttggcgagccgggtgattcaggtgccgggggcgctgataccgagatgatcactgatcgttcccacgctctgcgtgggagcgcagcccgggacgctccgcgtcccagaaacggacgcagagcgtccagtgaggcattcccacgcagagcgtaggaacgatcggactgaagccatccactcaatcgcggtaaaacacctgcaccaggtgatagccaaacttgctcttgatcggcccgtgcaccaccttcaccggcttcttgaagatcaccgcatcaatcgcccccaccatctgcccgggccgcacttcgcccaggtcaccgccacgtttgcccgacgggcaggtggagtacttcttggccagcacatcaaaggcttcgcccttggcaatgcgctgcttgagttgttcggcttcttcgctggttttcaccaggatatgacgggcttgggctttcatggggctctaccagctgtgcgacggcgcgcgattatgcctgaactcaggcctcgccgccgatcatgctacggattttgttggccaacaggtcaatggaaaaaggcttggcgaccatgtccatgccgtcttccaggaacccctggcgctcggcggctttctcggcataaccggtcatgaacagcacgcgcaggccggggcgatgctggcgggcgatttccgccagttgccggccattcatgccgggcaggccaacgtcggtcaccagcaagtccacgcgcaaatccgactccagcaacggcagcgccgcacgcgcatccgccgcctggtgcgcggtatagcccagttcgtcgagtacattgaccaccagcatacgcaccgccgggtcgtcctcgaccaccaccaccgcttcaccggccagggccacgggggcttcggtcaggctggtaggcaggctgctttccagtgcggtgccatacaagcgcggcaggtacaggcgcacgcaggtgccctggccgggttcgctctggatagttacgtggccgccggactgctgggcaaagccgtagatcatcgacaacccaaggcccgtgccttggccgatgggcttggtggtgaagaacgggtcgaaggccttggcgaggattttcggtgccatgccgctgccgttgtcgctcacgccaagcatcacatagtcgccggccttgaccggttccagggtggtgatgtcggtgccgtccaggtaactgttggcggtttcgatcagcaactcgccgccgtcgggcatggcgtcgcgggcgttgatcaccaggttgagcagggcgttttccaactggctggcgtcggtgttcaccggccagatgtccttgcccagttggaccttgagttcgatgtgcgcgcccttggtgcgccggaacaggtcttccagggacgccaccagttggttggggtcggtggggcgacggtccagcgactggcgccgcgagaacgccagcagccggtgggtgagggcagcggcacggtgggcggaggacacggccgcatcggcaaaccggccgatatcgtcgctgcgcccggcggcaatatagcgctgcatcaggtccaggctgccgataatgccggtgagcatattgttgaagtcatgggcgataccgccggtgagttggccgaccgcttccatcttctgcgcatggcgcagggcatcttcggcacgttcgcgctcgaacatctcgttttgcaggcgctggttggcttcggccagcgcctgggtgcgctgggccacgcgttcttcaaggttctcgttgaggtggcgcagggcctcttcggtgagcttgcgttcggtctcgtcgatcacaaagatatagaaaccattcacagagccgtcactgctaaagcgcggcaagtacttcatcagcgcatggcgcgggcggccatcgcgatgaggcgtcactgtcatgaagctgcacgccttgcccttgagcgcggcggcgatcttgtctgcgcgccctgcgtacacctcgtcgccgatgacttcgcggatggttctgccgtacagctcctggggcgtcttgccgtaccactcgaggtaggcgctgttgttgaggcgaaagcgctggtcgtggtcaacgtagccgatcaacaccggcatggcgttgatgatcaattgcagctcggtctggctctggcgcaaggcctgctcggtgtttttgcgctcggtgaggtccagcgcggcgccgaggaaccgtgccggccggccgtgatgatccttgtagcagcggccacgggcgaatacccagcgcacctggccatcggcttgctgcaggcggtactcttcggcgtattcggtgccgtgggtgatgcaatgcttgatgctgcgcgtcaccgtgccccggtcttcgggatgcacgccgtgcaggtaggcgctgatgggcagcaggcttgagtcgttggggtcgacgccatgcaggtaggcgaaatgggcgtcggcaatgaagcggtcttcaccgatatcccaatcccaggtgcccaccgcgtcggtggccgccagcgccagttgcaggcgctgctcggtgttgtgctgggccttgaggctcgcttcggaacgctgttgcagttcgagggttttgctgcgccgttcattggtttcaatggccgtgaccagaatgccggccacccggcagctttcgtcgcgcaccgggctgtaggtcaggtcgagccatatctcggtgtcgcggccctcgcgttgcagcacaaagcgttgctcgctgaaggtgcgcacctggccgccgagcacggcgtcgtagaccggcgcggcgaagctttccagttcgggccaagtgtggtgcgccggctggcccagagcgccggggtgcttgccgcctatcaggtgggcaaagccatcgttataaagttgtatgaggtgtgggccccacagcagcaccattggcatgggtgaatgcacgacgatatcgacagcagtgcgcaggctttgcggccactcactggcctcaccgagtgggctttgcgcccagtccagccgcttgatcagcgcagcggcttcgctaccggtggatgttccattcataaaaaaacctgagcctgacgctttgaaaaatgacaacccccattgtcccaaggaacgacagcgggtgactacccccgaaaaatagcatgccttgagggtttttcttcaaaacgctgtgtcagcgctgaaacctttcatctactcggccagttcagctctgtggcgaaattgctccagtgcctgggggttggccagggcatcagtgtttttcaccggctcgccatgcaccccattgcgcaccgccaattcgacgattttgccgctgatggtgcgggggatatccgtgacagcgaggatcttcgccgggacgtggcgtggtgtggtgttggcgcgaatcacctggcggatttgctgttgcagcgcttcgtccagttcgaccccgtcatccaggcgcacaaacagcaccacgcgcacgtcgtcctgccaacgctgaccgatggcgaggctttccagcacctgcgggactttttccacctggcgataaatctcggcggtgccaatgcgcacgccgccggggttgagcaccgcgtcggagcgcccgtggatcaacaggctgccgttggcgcgttgctcggcatagtcgccctgggcccacacgccgtggaactggctgaaatacgaagcgcgcagcttttgctgctgcgggtcgttccacaacccgatgggcatggcagggaaatgccgggtgcacaccagttcgcctttctctccgatcaggggccggccctggtcgtcccacacttcgatggccatggccaggctcttgcactgcatctcaccgcgccgcacgtgcagcaccgggttgccgatcacaaagcaggagacaatgtcggtgccaccggacatcgaggacaggcacagatcggctttgatctcgcggtacacgtagtcgtaactctggggcgacagcggcgagccggtcgaaatcaggcccttgaggctgcccagatcgtggctctggcgcggctgcaaccctgacttttccagggtggcgaggaatttggggctggtgccgaacacgctgattctttccgcatcgatcaggtcgatcaagcgttcggggccggggtggaacggcgagccgtcatacagcaccgcggtggcgccgatcgccagcaccgacaccagccagttccacatcatccagccgcaggtggtgtagtagaacaggcagtcctcgcggttcaggtcggcatgcaggccgtgttccttgaggtgcgtgagcagtacgccgccagtgccatggatgatgcacttggggatgccggtggtgccgctggaataaaggatatacagcgggtgatcgaacggcaccgcgacaaattcgggttcgccgcaagctttgtaaaagtcgtcccacagcgcgacgtgggcgtgggtggtgtagtccccagcctgagcctcgggcttggcgtaaggcacgatgatcagctgttgcagggagggcaggcgttcaaggatttcattgagcttggcgctctggtcgatgcgcttgccggcatagcggtagcctgcgcaggtgatcagcaccttgggctcgatctggccgaagcggtcgatgacgccctgggtgccgaaatctggcgaggagcacgaccagatcgcaccgaggctggtggtggcgagcatgccgaccagggtttgccaggtgttgggcatgcacgcggccacgcggtcacctataccgaccccggccgcccgcaggcttttttgcaggccggccacgtgttccgctagctgcgcatagctcaattgttcacgttggccgtcttcgctgacagccaccaccgcaggatgatcgtcacggcggcgtaacaggtgttcggcgaagttcagggtggcgccgggaaaccaatgggcgctgggcatctccacgtcttcgatcagggtgacgctgggcgggctgcgaaactgcacgtcaaagaacgcgacaatcgcctgccagaagtccgggcgctggtcgatgctccattggtgcagggcggggtagtcgtggagctgaacgccgtggcgctggttgatgaagcggcggaactggtccatgcgcgtggcgtggatgcgtccgggggacggttgccagaggatgtcggacataagctgcctcttctcgttcccacgcttcgcgtgggaatgcctgactggacgctctgcgtccacttttggggcgcggagcgccccggtctgcgtgcccacgcagagcgtgggaacgatcatcacgggtttactgggccagccagccaccatcgatgttccaggccgcgccgcgcacctgggcgccggcttcgctgcacaaaaacaacaccagctcgcccaactgcgacggcgtcacaaactccagcgacggctgtttctccgccaggagatcctgctgcgcttgctgtgggtcgaccccggtagccacgcgatcatcaatctgcttctgcaccagcggcgtcagcacccagcccgggcagatggcgttgcaggtcacattactggtggcggtttccaggcccaccaccttggtgaggccgatcaccccatgcttggccgccacgtacgccgccttgcccactgagccgacttggccgtgcaccgaggcgatattgacgatgcgcccccagcccttggccttcatgcccggcaggctcaaacgtgtactgtggaacaccgaggacaggttgatcgcgataatcgaatcccagcgttccaccggaaagtcttccaccgctgccacatgctggatgccggcattgttgaccaggatgtccacgccaccgaactcgcgctcggcgtaagcgagcatgtcggcgatctgcgcggggtcgctgacgtcggccgggtgatgcccgaccttgccgccaaacgcctgcacctgggcgatcaccgcgctggcgtcgccaaagccgttgagaatcaggttggcgccggccttggccaggctcagggcaatgcctaagccgatgccactggtggagccggtgaccaaggcggtcttgccattcaaagtcgtcatgaaaacctcacacaatgccggtggcgtagaaagtaccgatcaccacgaacaccgcaagggtcttgatgatcgtgatgccaaaaatgtccttgtaggcttcgcggtgggtcaacccggtgacggccagcagggtgatcaccgcgccgttgtggggcagggtgtccatgccgccgctggccatggccgcgacccggtggagcacctcaagggggatattggccgcgtgggcggctgcaataaagctctcggacatcgccgccagggcgatgctcatgccgccggaagcggagccggtgataccggccagcaaggtcacggtgatcgcttcgttgaccagcgggttggggatgcccttgagccagtccgccagtaccagaaagcccggcagcgaggcgatcacggcgccaaacccatattccgaggcggtgttcatcgccgcaagcaatgcaccgcttaccgcgcttttactgccttcggccagcttgctcttaattgccgagaagccgaacaccagtactacgataatccccaccagcaacgccgcctgcaccgcccagatcgcggtgagcttggcgatttcggtggtcaccggcgcgctcatgcccggcaggctgaggctgtgggtcttgccgtaccactgcgggatccagtgggtgaacaacaggttcatcacccccaccaggatcagcggcgacagcgcgagccacgggttgggcaggctcaggttgtcggcggtttccggctcattgcgcaactcggtgccataaccttcacctgcgcgctgggccttgttgcgctggcgtgcgaggtagagcatgccggcgcaaaacacgaagatcgtgccgatcagccccagccacggcgccgcccaggcggtggtgttgaagaaggtgctggggatgatgttctggatctgcggggtgccgggcagggcgtccatggtgaacgaaaacgcgccgagggcgatggtcgccgggatcaggcgcttggggatattgctctggcggaacatctcggcggcgaacgggtacaccgcaaacaccaccacgaacagcgacacgccgccataggtgagcagggcgcagaccagcacaatcaccagcatcgcctggcgggtgccgagcaagcggatcgcagcggccacaatcgaacgcgaaaagcctgacagctcaatgagcttgccgaacaccgcaccgagcaggaataccgggaaatacagcttgataaaaccgaccatcttttccatgaacaccccggtaaaggcaggggcgacggcggacgggtcggtgagcagcaccgcgccaagggcggcgatgggggcaaacaggataacgctatagccacggtaggcggccagcatcagcagcgcgagcgcagccagggcaatgatcacactcatggtgtgtctccatcggattgttattgttgtggggtgaggctgtgggagggagctaaagcgagatgtgtgccaaatttttaacttgttgatatatatagctttatttacttttaacgacggttttccagaagatagtctcaatcgagagacgagtggagatcccttgtgggagctggcttgcctgcgatagcggtgtaacagtgcaatattccccggctgaaccaacgctatcgcaggcaagccagcccccacacagggttgtcttgatagtgggaatattgtctcctttatgagactagcttattccacgcgccagcatttttttatacagcgtcgaccgccccagccctagccgcttggctgcctccaccacattcccctcacacgccgtgagcgcggcggcgataacctgccggtcaaaccgttcccgtgccgcactgaatgtctctccctccatcgacaccagcgcacggcgttcaaccggcgtaaaagtgccaatggccgtgcgtatctcctcggcactcaacaccacgtcatcactcaacagcgccgcccgctccagcacattgcgcagctcgcggatattgcccggccaggcatgttgggccaacagcgccagcgcatcgcggtccagttcgtgctggctgcgcaactcctcaaggatcgcctcgctcaacgccggaatatcctccaggcgttcacgcaacggcggcacctggatcggcagcacgttcagtcggtaatacaaatccgcacgaaactcgccacgtttgatcgccgcctccaggtccatggacgttgcggcaatcacccgcacatcgctgtgcagcatctcgttggagcccaccggttcgaattccttttcctgcaacacccgcagcaatttgctttgcagtggcagcggcatgtcgccgatctcatcgagaaacaacgtgccgccctgggcgatctggaacttgccggggcggcccttgcggtcggcaccggtaaaggcgccgggtgtggtgccgaagaattcggcttcaagcaggtcatggggaatcgccgcgctgttgatgctcacaaaggctttgtgcgcccggggcgatgcgccgtggatggcctgggcgagcagctccttgccggtgccggtttccccgagcagcaataccggcgattcggcgctcgcactgcgccgcgcccggcgcttgacctcaaggctggcggcgctggtgccgataaagtgcgcgaagttgtatttgctttgccgcgagcgcagcagtgagcgcgtggaggccagctcctgctgcatgctcaggtagcgctcgatcaacggcgacaggttgcgcagttcatcgaacagcgcaaacccaatcgcgccgatcaccgccccggcctcgtcgtggatcggcaggcgcatcaccaccagcgggcccttgggagtgtcctggatatccagcaggatcggccggtcattgcgcaccacctggcgcagcaggctgttggaaatcacctgctcgcaaggctggccgatggcttggtcggcgctcttgaggccaaaacgcttggcgtaacgctcgttcatccacacgatatttgcatcgcggtcgacgatgaccgtgccttcgctggactgctcgatgatctcgaacagcgactggatggccaggccgcgaacctgttggtagtccttgaggctagtgctcatggaggcagaatcctgttaatcatcacaaggggatgtgcgctgctgccagcagttctttggtgtacgggtgttggggcgactcgaacacatcatggctggcgccacgctccaccaccttgccatccttgaccacgatcatgtcatgagccatggcgcgcaccaccgccaggtcatggctgataaacaggtaggtcaggccgtatttgtcctgcagttcgcgcagtagcgccactacttgtttttgcaccgtgcggtccagtgccgaggtgggttcgtcgagcagcatcagcgctggcttgagcaccagggcgcgggcaatggcgatgcgttggcgctggccaccggaaaactcatgggggtaacgatgccggctggcagggtcgaggcccacgtccttgagcacctggatgacttgcgcttcgcggtcggccaggctgcacggtgcgtgtacttccaggccctcgctgatgatctgctgcaccgacatgcgcgggctgaggctgccataggggtcctggaacaccacctgcatctgcttgcgccacgggcgcatctgctgatggttgagcgggtccagggcctcaccctggaagcggatgctcccgctggagtcgagcaagcgcaggatcgcctggcccagggtggacttgccggaaccggactcaccgacaatccccagggttttgccgcgctgcacgctgaggctgataccgtccaccgcgcgcaggtaggtcttggcccggaacagcccgccgccaagggggaattgcacgctcaggtcatccacttccagtaccgtctcacgcggctcgctgcacagcacatcgcccgagggctcggcgtccagcagcaggcggctgtagggatgctgcggtgcggtgaacagggcctggcagtcggcctgctcgacgatttccccggcgcgcatcacgcagacccgctgggcgatactgcgcaccaggttcagatcgtggctgatcaacagcagcgacatgcccaaacgttgctgcaaagatttgagcagcaacaggatcttgcgctgcaccgtcacgtcgagcgccgtggtgggctcgtcggcaatcagcagttcgggctcgcaggccagggccatggcgatcatcacccgctggcgctggccgccggacagttgatgggggtaggccttgagccgttcctggggtttctggatgcccaccagttccagcagttcgaggatgcgcgcctgcgccgccttgccgcccaggcccttgtgcagcagcagggtttcgccgatctgcttttcgatgctgtgcagcgggttcagggaggtcatcggctcctggaaaatcatggcaatgcggttgccgcgcaatttttgcagggtgcttggtgaggcgccgatcagttcctggccgcgatacttgatggaacccagggtttgggtgccggcttgcggcagcagttgcaggatcgaatgggccgtcactgacttgcccgagcccgactcacccaccagcgccaggcactcgccggggcgcacgtccaggctcaggttgcgcacgacggtctggccgttgaaggcgacgcataggtcgcggatttcgatcaggttcatacgcacttactcatgagcgagggtcgaaggcgtcacgcaacgcctcgccgataaacaccagcaacgacagaatcagtgccagggtgaaaaatgccgtcagccccagccacggcgcttgcaggttctgcttgccctggccgatcagctcacccagggacgcgctgccggcgggcatgccgaagccaaggaagtccagggcgctcaaggtggagatcgctccggtcaagataaacggcaaatagctgagggtcgcggtcatggcgttgggcaggatgtgccgacgaatgatcttggcatcgcccaggcccagggcgcgcgcggccttgacgtactccaggttgcgcccgcgcaggaactcggcgcgcaccacgtccaccagggccaaccaggaaaacagcgccatgatccccagcaaccaccagaagttcggctccacaaaccccgacaggataatcagcaggtacagcaccggcaggccggaccacacctcgaggatgcgttgcccgagcaagtccacccagccgccgtagtacccctgcagcgcgccggcggcaatcccgatgacggcgctgatggcagtcagggccagggcaaacaggattgacacccgtgccccaaagatcacccgcgccaacacatcgcgggactggtcatcggtgcccagccagttcaccgccgacggcgggctcggggcagggcgggtgagttcgtagttgggggtgtcatcgctgaacggaatcggtgggaacagcatccaaccgccctcctgcttgatcagcttttgcacgtagtcactgcggtaatccgcctggaacggcaattgcccgccgaactgctgctcggtgtagcgcttgaacaccgggaaatacagctcattcttgaaactgagcaccagcggtttgtcattggcgatcaactcgccgcccagggtcagtatgaacaggccgataaacagccacagcgaccaccagccacgcctgtttttcttgaagcgctcgaaacgccgacgggccacgggagacaggttgagcatcaggcgttcctcgcggcgaagtcgatacgcgggtccaccagggtgtagcagaggtcgccgatgagttttatcaggaggccgaacagggtgaagataaacagcgagccaaacaccactgggtagtcgcgggacaccgccgcctcatagctcatgcggcccaggccatcgagggagaagatcacctcgatcagcagcgaaccggcaaagaacacactgataaacgcctgggggatccccgagatcaccagtaacatcgcattgcggaacacgtgaccgtacagcacccggcgttcgctcaagcccttggcacgggcggtaaccacgtactggcgggtgatttcattgaggaacgagttcttggtgaggatggtcaaggtggcgaacccgccgatcaccagtgccgtgaccggtagcaccaggtgccagaaatagtcggccaccttgcccacggtactcagttcggcaaagttttccgagaccagcccgcgtaccgggaaccagttcagcgaggtgccgccggcgaacaccacgatcaggaacatcgcaaacaggaacgccggcatcgcgtaaccgatgacgatggctgtgctgctccacatatcaaagctgctgccatggcgcacggccttgcgtatgcccagcgggatcgacaccaggtaggtgatcagcgtggcccacaggccaagggaaatggtgacgggcatcttttccaaaatcagatcggtcaccgtcgcgccgcgaaagaagctgttgccgaaatccagttgggcgtagttcttgagcatcaaccacaggcgttccggcgcggatttgtcgaagccgtattgtttttcgatgtccttgatcagcttcgggtccaggccacggctggcccgcgagccgctgatgccttcgccggatgcgcccgccacaccaccgccaccaatgccttgcaagtgggcgatggcttgctccaccggcccgccgggcgcggcctgcacgatcacgaagttcaccaacaggatgatcaccagcgtcgggatgatcagcagcaggcgccgtacgatataggcaagcatcagtgggcctctccgcgttttttcaactcagcctgcatttgttcgttcgtcagcggggtggggctgacttcccaccaggtttccagggcttcgtcgttcttcgcctcgatggccgggcgtccgaaacggttccaccatgcggcggaggtgcccggtgggtaatagttggggatccacaggtaattccattgcagtacgcggtccagagcgtgggcataggtgagcatcttcgcctgggtgtcggccttgaccaggccatggatcagggtgtcgacggccgggtccttgagcacgatgtagttgttggcgcccgaatcgaacgcggcggcagagccgaaatagttgtacagctccatgccgggcgaggtggtgaccgggaaacccgtgacgatcatgtcgtagtcgcgggccatcagccggttgacgtactgcgaagagtcaatgcggcggatattcagggtgatgccgatctgcgccaggttgcgtttgtagggcagcaacaggcgctcaaggccgttctggacattcagaaaggtgaattccagcggctcgccctgggcattgacgagtttgtcgcccacaggtttccagccggcgtcttccagtagggccaaggcttgcagctgtttatcgcggatcatgccactgccatcggtgaccggggccttgaacacctgagtaaacacctcatcgggaacctgcccgcgcagaggctcgaggatcgccagttcttccggagtgggtaactggctggcggccaatgggctattggagaaatagctctgctggcggatgtacaggttgcgcatcatctggcggttggcccattcgaaatcccacagcatcgccagggcctggcgcacgcgccggtccttgaacatcggtttttgcacattgaacacatagccctgggccggctgcggcatctccttggccaggtgcgcgcgctgcaggcggccatcgtccagggccgggccgttgtagccgatggagtaaccagtggcagagaattctcggttgaagtcgtaggcaccgccgcgcagcacctggcgcgccacttcggtgtcgccgaagtattccaggctcaggtgatcgaagttgtacaggccacggctgaccggcaagtccttgccccaccagtcggggtcgcgtgtgaaggtgatggtgctgccggaatcgatcttgctgaccttgtaggggccgctgcccagcggggcttcgtaaccgccgccgttggcaaaatcgcgggtcttccaccagtgctcggggaacaccggcaaggtagcgatatccaggggaagggtgcggttttcgttgctggaaaagtcaaagcgcacctggcgttcgccttcgacttcgacgtgtttgacgtcggcaaacaacgtgcgatagcgcaggctgccttgggtcatcaacacgtcaaagctgtagcgtacgtcttgcgcggtaatgggcgtgccatcggcaaaacgcgccttggggttcaggtagaagcgcagcgacaggccgtcgccttcgcgttccatcttttgcgccaccaggccatagacagtgtaaggctcatccagcgagcgcaacgccaagggcgcgtacacccagccgtcgacctgggacacgccgatgcctttgtcgatatagggcagcacatggtcaaagcgccccacctccagcgccgaacgccgcaggctgccgcccttgggggcgttggggttggcgtagtcgaaatggctgaaaccttcggcgtacttggccggctcgccgtataccgtcaagtaggtttgcggggccgcgatcaccgcagtgctggccattagcaaggccagggtggaacagagcagagatgaaaaagccaatcgcattatcagccttgagcgccgggtaaagaataataaggatttgtacgctaacggcttgggcatcgccagtcatcagatgcacaacggcccaccaaagggcgggccgttgtttatagcatcagcgcagattgaatcaatcctggcggctggtgacttccagcaggtggtagccgaactgagtcttcaccgggccttgcacggtgttgaccggggcactgaagaccacggtgtcgaattccttgaccatctggcctgggccgaacgaaccgagatcaccgccttggcggctggatgggcagctggagttggctttagcgatttctgcgaaatcagcgccgccttcgatttgggctttgaggtcgttgcatttgtcttcagtggcaacgaggatgtgacgggcggtggctttggccatggtgagtaactcctaaagtaaaaacggtgagcgtaccggattcaggcggttatttcnnnnnnnnnnnnnnnnnnnnnnnnnnnnnnnnnnnnnnnnggggcgcctgagatcaaaagcagatcaagatcaagagcggctcgcttcgcatcgtggttaccgccttttgtaggagcgagcaagctcgctcctacaaaaggcaatgcgggtagggttgagcttcgcaaaaaccagaaaacccgccgaggcgggtttctcacaacttacagcccatcaagccacagcaggcgaatcaaggccgcgcttttcaatcaccgtaaacacatccgccacatcctggaccatgatccgggcggtattggcgacggtgttgatatcgtgctcggcatagtccgatacgttggagcaggccatcaagtgcaggtaggcgagtgcggcgttgaggcgttcgctggcgcaggcgtgcaactcgttgagcggtgcgtcgctgtcgatcagcagtaccggatagtcggttgcggtttgggacatgggggtgaagcggcggggcgggtgttgatcagtcatagtagtggtccttaaaaaagaaaaaacaccaccgttttgctgcgaaacaaatgggtggcagctgtgcgcgggttcgcagaccgggggaccactaccagcacccggcagaccagaaggtctcccacgcacaaccgccataaaacgagaggcagctgaaaatctgctgcgtcatgtttgacggtactagtagtgattttgtagggctgcgaaaccccatcgccgaccaatgccagcgacggagcgaactataaagtgaccaccgcacaggcgcaaccgacaggatgtatcaaaccccacccaccaacttcccactgtccatccggcgcttatacgcactgtcccggctcgccagccagaagtacagcggcgatgtcaccgccagccccaccacccacgataagtccgcgccgttgatgtgctgcgaaatcggccccacatacagcggcgtgttcatgaacggaatctgcaccgcaatccccaccgcatacgccagcaacgcctgtgggttgtacttgccgtagatgccgccatccacgcggaagatcgaggcgatgtcgtacttgcctttatggatcgcatagaagtcgatgaggttgatcgccgtccagggcaccagcaccacgagcagcaccagcaccatgtcgacgaagtgaccgatgaagtcttgggaggcaaacaccgccgcaatcgagcaggcggccagcacgatgatggagatcactgcacggcttttcgcagtggggatccagctgtaggcgaaggtctgtaccagggtgatgatcgacagcaccgcgccgtacaggttgagggcgttatggctgatcacgctgagcaaaaacagcaccagcatcaacgggccgatggcgccggtggccagtttgaccgcgtccatggtgtccatgcccaccggcgtagcgagcaccgccaccgcgccgaagatgaaggccaggctcgaccccagcgccgagcccaggtaggtagtccagaaggtggcggccaccggcacgtcggcgggcaggtagcgagagtagtccgacacgtagggcgcaaatgcgatttgccacagcgcagccagggaaacggtggccagccaaccggagatgttgaagctgccacgggttagaaaatcggtggtctgcacatgggtgaagatgtagccaaagcccagcacaatgccggcgcccagcacccaggtgccgatgcggttgagtacgtggatgaagcggtagccgatgatgccgataatcccggaaccgatggcgccgataacgatgcccaccggcacaggcacggcgtccaccacgccatgcagggatttaccggccagcacgatgttggaggcgaagaaaccgatatacatcaccccggcaatcaccaccaccagcaacgcgccgagggagccgaactgcgcgcggctctggatcatctgcggaatgcccatctgcgggccctgggccgagtgcaatgccatcaacacaccgccgaccaaatggccgacaaggatggcgacaatgccccacaccaggttgagttggaacagttgtacacccagggcgccagtgacgatcggcaacggcgcgatgttgccgccgaaccacagggtgaacagatctcttacctttccatggcgatcttgcgggggcacgtatccaatcgtgtgtttttcgatgagcggggcgctggatgttgcagtggtaaccatgacgagctccaaggcaaggtgagtacgtgggcgtacttcgctgtgcggcgcatgggcgccgctttgttgttggagtgatcatctgcaatgggcgcaggcaggtaaattagtaagtttgttgctatagaccttaaaaaaagtatctcgtgagattttttgctccggtatgttgcatgcacgtcaatggcttgaaaaaccggtgtttctgcgcacttgtttggggcaaaacaccacgtttagggaggtgccgatggcagtctataacctgcgtcagctcagatattttgtgaccacggccgaatgcggcagcgttgccgaggcgtcgcgcaagctgtatatcgcccagccgtcggtgtccacggcgatcaagcaactggaagatagctttggcgtgcagctgtttatccgccatcacgcccagggcgtttccctcacgcccagcggcgcgcgcttttatcgcaaggcgttggagttgttgcgggtggcccatgagttcgagcagaacgccctggccgataacgatgtggtggccgggcagatcgacattggctgttttgaaactgtggcaccgttgtacctgccacgcttgatcgccggcttcaaggcgcgctggccgggtgtggagatccgcatccgcgatggcgagcagcaggaactggtgcaggcactgacggcgggcagtatcgacgtggcgatgctgtttgagcacgacctgggcggtaccatcgagaccacgccgctgatgccgccccaacagccctatgcgctgctgcccgccgatcaccgctttgcccagcaggccaaggtgtccctggccgacctggtgctggagccgatgattttgctggacgtgttgcccagccgtacctacttcgtgagcatcttcgaagagcgcgggctgacgccgaatatcgtgttcagctcgccctccatcgaaatggtgcggggcatggtggggcgtgggttcgggttctcgatcctggtgaccaaaccgttcagtgagtacacctatgatgggcagaaagtggtgtgtattcccttggcggaaacggtcacggggtcggggttgtcggccgtctggctacgccgcgcacctttgaccaaaccggtgcagttgtttgtcgactactgccgcgaagagcttgcacgtttgctcggctgaatagggtaggagcgagcaagctcgctcctacagagggtgatgaccgagtcttcaggttctgataaaacctaacaaccgctgcaacatggcatcgcagccatcaagctgctccaggctcacaaactcatcgggcttatgcccttggtccatgctgcctggcccgcacaccacggtgggaattcccgccgcatcgaacagcccgccctcggtaccaaacgccacggtgccgaagtcccgcgagccgcaaaacgccgcaatcaactgcgccgcctggctgcgctcatccgtgaccagccctgggtaggctgacaactcggtgaaccgaatcgaactctgtgtgctgaccgcctgcatgcgcggcaacacccgctgcagcgcgtaggcctgcaactcttcagccacttcgcccgggtccatggagggcagggcgcgcacttcaaagtcaaagcggcagtcggccggcacgatattcaaagccttgccgccgttgatcatgccggtctgtaccgtgctgaacggcgggtcaaaacgtgggtcctgccgtgcgcgtaaccgctggccaatgcgccccagttcaccgatcaattcggcggcgtgttctatcgcattcacacccgagggcgcataggccgagtggcacgcctggccctgcacatcgcagcgcatcgccaacttgcccttgtggcccagcaccggtttgagttcggtcggctcgccaatgatgcacagcatcggcttgaccggacgttgttccagaaccgcgagcagcgagcgcacgcccaggcagccgacttcttcatcgtaggacagggcgatatgcaccggcaggcgcaacggcgctttgaccaacgccggcaccaacgccagcacgcaggcgatataccccttcatgtcggcggtgccgcgtccgaacagcttgccatcacgctcggtcagtgtgaacggcggcagggtccacggttgcccgtccaccggcaccacgtcggtatgccccgacagtacgatacctggcagttccaccgggccgatgctggcaaacaggttagccttgctgcgttgcgcgttgtagaccagctcgctggccacgccaaacccggccaggtaatcgcgcacatactcgatcaattgcaggttggactcgcggctggtggtgtcgaagcccaccagggtttccagcagttcgcggctgcggctcatcggtcgtctccggccacgccgtagccgggggagcggtcgggggcgagggcgcgatcgatatagtcctgcacctgtgggcggtaggcgtcccagagtttttgcaattcgccaatcggcgcatcgtcggcccaatccacgcgcaagttgatgatcggccacgtcaactcgcccaccaccaccagcgcggcggagtgcaccgggccggcttcgccaccggcggcgatggcggcgtgcatggccgccagcaggcggtctgcgagctggccttcgccctgttcgaaggccgtgaccatcgcggtgatcacttcaggggcggcgagcatattgcccgccgccacgcattgctcgcccgacaccgcgtgatgggtacccagggtctggctgccgctgaaatgcacgctgcggcccagatggtcaattgccgtcagttgccggtactggctgtagccgttgcgggtgagcgctttgtcgacggcggcggcgggggccaggccctgttccagcccgtcgaggacgtccgggccgagagccggcaaggtgatgttctgggtcgacactgcgcccacgccgggccgcagccacgggcagcgggcgcccacggcgatgctcgatgagctgatggcaacgcccagttggccggtctctgcacaacggccgacgatggaaaaggtcatggctagcctccttactctggaataaccgcgatcacatcaatttccatcagccactgcggctggcccagggccgaaaccaccagcccggtggaaatcgggaacacgcccttgagccacttgccgacttcctggtacaccggctcgcggtagcgtgggtcgatcaaataggtggtggtcttgacgatatggctgaggtcgctgccggcttcttccagcagttgcttgacgttcttcatcgcctgctcggcctgggcccgtgggtcgccgaggccgaccaggttgccgtcgaaatcagtgcccacctggccgcgtacgtacacggtgttgccggcgcgcacggcctggcataggtcgttgtccaggctctggttgggataggttgctttggtgttgaacatgcgaatgcgagtgtgggtaggcatcaaaaaactccagggaaaagtgatcaggcgctgacaggggactggcgggcaaccggggcggcttcgcggtactcaaggtactgacgctggatggcgatatggtcggccacgtatttggcgtcgtgccacacgccccagataaacgacgagccacgccgcgattgccacggcaaaccgaggaagtagatgcccgcttcgctggagacaccgcgctggtgttgcggcttgccggcggcgtcgaaggcgtctacctgcaaccagctgtagtccacggcaaatccggtggcccagatgatcgaggtgatgccggcttgcgccaggtccagctccaggatcggctgcttgatgcattcagcgtcagggaacacgcgacgtgcctcgggctccaggggcaggtcgaggccgttgcgctcgatataggcgtcggccgcgtccagcagggtcaggtagttctcatcaccgcgcgccaggttttccaccaggttgggttggaacgttgccaccgtgccgttgaaagcgtgggtcaggccgaccagggtcatgccttgctgggccagctcgcgaaagtcgatggtcttgccgccgtgagcgccgctcacggcaatggtgacgtgctcgcggccgggtttcatcgccgcctggtcccactcgcccaatacgcccagccaccagcagaaatcgcggttgcgataggcgcgaggcgggcggtcatgggcgccaaccgacaggtacacctggcggccggagcgctgcaattcgtccgcaatttgcaccccggacgagccagcgcccaccaccaatacagcgcccgcgggcagttgcccagggttgcgatagtcggcggagtggatctggtgcagcacggtgtttttgggcgctatgccaggaatcaccggcttctgaaatggcccggtggcggccaccacgcggttggcttcgatcacgccttcgctggtgtgcacggtaaagccggggcggccgatgttgcggaccactgaggtgacgtccacgccggtgcggatcggcgcattgaatttacgggcataggcttcgaagtaatcagcgacgcgctctttgggcgcgaagccatcggcggggacgtcatcgaattccaggccggggaagcggtcatgccaggctgggccgttggcgaccagcgagtcccaacgcccggtgcgccagcgctcggcgatgcggctgcgctccaacaccaggtgcggcacgccttgcttgctcaaatgctcgctcatggccacgccagcttgacctgcgccaaccaccagcgtgtctatttttgttattgctacagtcatgtctctatccttgcgtaatgcagttggattcagcttgggcatgacgtcaagttagggggcagggagttattaataaaatattattaagttgggaagtgagcataaatatcggatgcagaagagaagaaggccagccaactgtggagctggcttgcctgcgatggcggcctcaaagccgacacctatctacctgatatccacgatcctcgctcgttctgaaagactaaggggcattttcttcaatacctctcgtctttgtgcgcgttaccgtgatctcaacatcgttggcatcacacaaggaattgtaatgagcttgattctctccatggccgcttttgccctggccacgtccatcactcccgggcctgtcaatgtggtcgcgttaagtgccggcgcgcgtttcggttttgtcgccagccagaaacatgtgttgggcgctgccgtaggtttcaccttgttgttggtactgatcggcttggggctgcatgaagtgctggtgcgctggccgatcctgatccaattgatccgctggggcggggtcgcgttcttgttgtatatggcgtggaagctggcggtggacgatggccgcctggacgctgacggtgcccacaccgcgccgtcgatgctgtatggcgcgatcatgcagtggctcaacccgaaagcctggctggcgtgtgtggcaggcatggggttgtttgtggctgacggcgatgcggcgcaggtgtggttgtttgccgcgctttacctggtgatctgctacctctcggtggcgtgctgggcgtatgcggggacgtttttgcgccgctatttgaacaacccgaagggtgtgcgcctgttcaaccgctcaatggccgcgttgctggcggccagtgtgggttatttgctgatggcttgaggttctcgcggtactgccccggcgtggccgcaaaatgttgtttgaaggtgcgctggaagtgcgcctggtcggcaaagcccgcggccagggcgacgtcggcaatcagcgcgccattgcgcagttggctgcgggcgaactggatgcgccggttgaccatgaaagcgtggggcgtcaagccataataccgcttgaacgcgcggatcaggtaagacggcgacaggtcggcggcctcgcagatgtcttcgagtttcaaggcctgtgtgcagtaggcacgaatgtagtcggcggcgcgctccagcttatggttgacctcgcgtaccggcgtcagcgaagggttcaggcgctgttgcacgtcggtgaagtaactcaccagcgtgctctgcttttgcagcagttcggcctgatcatccactagcgtgcggtacagttcgagcaaaccgtggtacagcccggtgtcgcgggtatggggcgtgtcgaatggccggtagccctggtcggtactgaaccccagttggtattgcaggtcggtcagccagggcgtgtcgaggtacagcatgtaataggaccagggctggtcatggatgggattgcaggcatgcacatctccggggttcatcagcaccacggtgccggcgctgatttcgaaggtgcgagcgccgtagtggtaatagctgcagccggtggtgatcgcaccgatggaaaagtgctcgtgggcatgccgggtatacgtgaccttgcgcccgtcggcaatggtgcgcgcctcgatgaacggcaggcgttcgtcgcgccagaaaaacggtgctgtaacggcggtcatggacgggcgctcccggaaggtaatcgaatgagcaggccagcagcgttatataaaaaacgcgattgttcaagcctcctgaggttcgagcgccaggtcgcgcagatagtcggcccaggggtcactgccgttggcagctgcctgcaggctaatcggcaacttggcttgctggctcaaagccaagctgtcgtgcaacaagtgctgttcgacaataatcttcgtcagggcgtagctgcgtggtgagtccaaggtgcgggggacgcgtcggcccaggctgtctggcgcgggaatgctgtctgcgctgggcagcttatggtcgagcatgttgagcaccaggctggtatcaacagccgtcagagcgaccttggccggcggcgttccgtgtgcatatgcctgccagtcgaagcgcatccaggcttggtgagtggcagtgtcgacggctcgcatgacctgggtgtagttcagctcgcgtcttgggcgaatcagcatctgcctggggaagcattcatagaagtaccgctcagtgaaatatgcgacatacaccagcacagccaatcgacccacctcggtagagtcgcgcggcccccgtcgactcacgctgaaaaactgcacattgccgtattccatggcttcacgccgcggtaaggtcaggtgcgacagccaataacgaatggattccccgtaagcggccttcaactgctgcagcttcttgtcaaaggcggtggaaaatacgctgttgatctgccccagcagatgaaagcgcttggccatttcccggtatttgatcgccgggttcgaggagtgccagcgatttgaggcggcgtccaggctgccagccatgtgcaagtcgacgaacgaatacttggggccggtatgtacatcctcgaaacgaccctcttctgaaaacggcgagttttccggcagccacatcaacaggggtgtttcgagcagggggttgccggggtagaccttgcgcagatcctgcagggcggtctggcgcaaagtgacgatgggctgggcaaatgttcgcagggttgacgccaggcgtgcacgttgaaaattgagcgcttggcgtgcggtgttcaacgccagggaaccggtacgtgcctgggtgcccagtacgccattggcctcggcccagtccaggacggggccggctgcttcgtgactctccaggaagtttttccacgtcccctcggggggtaggtaggccaggctcatgatctgctgatagctcaactgacgagacgacccttgcacgaccttttccatgtagcttacgtactggcggaacagcacccaggcctgggagctctggcaaggggtggattcgggaatgtcgcgaaccagcaagtgtgggctttttccgcagagcagcaggtgggtggccaaggctgcgaccggtgcgttgagcccgtgcaggctggcttcgatctggtggcgggtgaaagatgcggattcgccccagtggtaatcatcctgccagtcgatggagttgatacgggtgggatgcacgtgcggctcgggatcaaggctcaaaatcaacgcggccaggatcagtgcgttgcgactgccgctctcggtgctttcaccggcatgcccgccgtgccagtgcagggcgtttgacaggcgttcacccagttgttgcgccaaggaggacgccagcacgcgcatcaggagaaagtctgcttctgcgtgcacgtcggcgacggacttgccggccaggtcgaccccgccaagcacttcaaacagcagaccgtccttgtccgtcatgaatgcgtcgctgatggtcaagacttgttggcgttccgacgtcgacagctgccacgccgtcgcctgccagccggtcgacggtttgagagcacgccaccaggcacgatcgctgactgacaggggctggatgacttccaggcgctgtaacgtgacgagcgcttcttccaatgtgcggggcaaactgaagtggtaaagcttcaacgcctgggcgagggtcaccgtgttgtcggtgcgcagatagccgccggtcttggctgccaaatcctgaagttggcgtaacagcgtcgccagcctgggttgttccagtacggcatcggtcagtgatacccatttgccgtccaggtcgcaggcgctaaggctgccggtggcgctcagtatcatgtggctggagggatcgatgcgcttgctaacgcgcagggccaggaaggctgagtcgtcggtcaggacagttaattgcccgtaggcttttttcacggtggcctcgagggcgtccggatcggcgctgatcaacctgtcaaggccgtcgggacttagcatcgcgccatcgtcgatggccttcgccagtgcagtgtgcaacgtatgacggtcgttcaacacgccgacatagtgttgataacggtacagctcggcaaaggagcgcctggcgttgagtaccaccggtactgccggtttgggcacttggcgcaagcgcccgacaagggcgttgatggccgagacgctccaggggcgctcgatggcgtaggcctgcaatgccgcagccacgctgaggctatgattgagataaagatccagccccaactgtttgctcaacgacaccagcgtgtcccagcgggcatcgtgattggccgggtcaaggaagctccactcttgctcattgtcaatgtggggcaccgccagttgctggagctggaagttgaagtaaacgccggttgttgcttgcgtgttcgtgcccagatcgttttcatccatgatcgcctgcagcaggctcgctgcttgtttcaaggtcctggccagtcgcgaatcggacgtcagttgcaggcgcgtgcgataaatgtccagaggcgaataggcctcgctgtccagggtaatcagagccagagcatcggccagttgctggctgtcctgggactgctcggtcaactcagcgtagatcattgacttgctgcgcccattatcgtcaaagcctggaaaacggcccagggtcctgagttcttcgacaattgtctgggcctgtaggtgattggcgggcatcggcaagccatggaaggccagtaccaggttcaacggccaggtcagggtgatcgcctgcggctgcgggtcgatcagcggcaaacccagccccatcgggtcgattagttggctgataaaaataatcgggttggcgtgggcccaccagccggacgcgtcggccatcttgaaggttttgggttggttgcccacggtggcgctcagggtgctgttctggacccgcaggctcttgggggtaatgccctgagcgtcggcccaggccctgaaccccttggcgttgatggatttgccgaaggctgcgctccattgacccagcaatgacccgggggcaatcggtatggggtgtatgggggctgccagggcctggctcgcgggggcgcaaagcaggctggtcagttgctcgatcagattgcggtcaccctccgtaagcaaggcctggcgctcacttacaaaggtgctcgtaggtttgagcgtgaccggcagggcggtatcccaggtcagggcgagggcgtgaaagtcttccatgagtacggttccggttttgagggtaaagccggatgttgacagtggcggtcggcaccttcgtagcaggggtttcctgcaaggccgtggcttgtatcagccagcaccgcgaggggctggccttttgtcaggcaggtacgagaaaggctgcctggagcaactgccgggtatacgcgtgctgcgggtcagcaaaaatagcctgggcatcgccttgctccaccacctggccttgcttgaccaccatcaattggtgactcagcgccttgaccaccgccaggtcatggctgataaacaagtaggtcaggttgtacttggcctgcaagccgcgcagcaactcaaccacttggcgttgtaccgtgcggtccagggccgaggtgggttcgtccagcaggatcaggcgtggcttgagcaccagcgctcgggcgatggcgatgcgttggcgctggccgccggagaattcatgggggtagcgatgccgggattcggggtccaggcccacttccttgagcgccgcgataatcgccgcttcctgttcggcgggcgtgcccatcttgtggatgcgcaagccctcgccgacgatttcgctgacgcacatgcgcgggctcaaactgccgaacgggtcctggaacaccacctgcatttcccggcgcaacggccgcacctgttgctgggtaagcctgtccatttgctggccttcaaagcgaatcccacccttgctgccgatcaggcgcaaaattgccaggcccagggtggatttgcccgagccactttcacccacgatgcccagggtttgcccctggggcaggctgaaattgatgccgtccacggccttgacgtaatccacggtgttgcgcaaaaagcctttcttgatcggaaaccagactttcaggtcgtccacctccagcagcggtgggccgacctcattattggccggaccgccactgggctccgccgcgagcagttcctgggtgtagggatgctggggcgactggaacagcgtctcgcaatcggcctgctccacgatgcaaccttgctgcatcacgcaaacgcggtgggcgatacgccgtaccaggttgaggtcgtggctgatcagcaacagcgccatgcccagccgcgcctgcaactccttgagcaattccagaatcttcaactgcacggtgacgtcgagggcggtggtcggctcgtcggcgatcaacagctcaggctcgttggccaatgccatggcgatcatcacccgctggcgctggccgccggacagctcgtggggcaacgccttgaggcgtttgtggggctcggggatgcccaccagttccagcaactccaacgtgcgctgggtggcgaccttgccggtcaggcccttgtgcagcccgagcacttcgttgatctgtttttcgatggagtgcagcgggttcaacgaggtcatcggctcctggaagatcatcgcaatacgattgccgcgtatatgccgtagggtcttctctttgagcgtcagcaggtcttgccctgaatattcgatggtgccagacggatgccttgccagagggtagggcagcaggcgcagaatcgaatgggcggtgaccgatttacccgaaccgctttcgcccaccagcgccagggtttcgccgcgcttgatgtcgaagctcacgtggttgaccacccggtgatgatgctcgccggtgacgaactcgacactgaggtcgcggatttcgatcagattgtccggattcatctcatttcctcgggtcgaacgcatcgcgagcggactcgccgataaacaccagcaggctcaacatgatcgccagcaccgcgaaagcgctcatgcccagccacggcgcttgcaggttggacttgccctgggccaccagctcacccagcgacggcgaacctgccggcagcccgaagccgagaaaatccagggcggtgagggtgccaatggcgccggtgaggatgaagggcaggaaggtcatggtcgaaaccatcgcattgggcaggatgtgacggaacatgatcgcgccgttctgcatgcccaacgcccgcgccgcgcgcacgtactccaggttgcgcccgcgcaggaactcggcgcgcaccacatccaccaggctcatccaggaaaacagcagcatgatccccagcaaccaccagaagttgggttgcacgaagctggccaggatgatcagcaggtagagcaccggcaagccggaccagatttccaggaaacgttgcccggccaggtcgacccaaccgccataaaagccctgcaaggcgccggcaatcacgccgatgatcgagctgagtatggtcagggtcagggcaaagagcaccgacacgcgaaagccgtagatcacccgcgcgagcacatcgcgcccctggtcatcggtgcccagcaggttgaccgaggacggcggcgccggggccgggactttcaggtcgtaattgatgctctggtagctgaatggaatcggcgcccacaaggtccaggcgtccttggccttgagcagttcctggatgtaggggctcttgtagttggcttccaacgggaattcaccgccgaaggtggtctccgggtagcgcttgagcgccgggaagtaccaaccgccgtcgaagtgcaccgccaggggcttgtcgttggcgatcaactcggcgcccaggctcagcacgaacagcaccaggaacagccacagcgaccaccagccacgcttgttggccttgaaccgctcgaatcggcggcgattgaggggggacaggttcatctcaatgctcccggctggcaaagtcgatacgcggatcgaccagggtgtaggtgaggtcgccgatcagtttcacgatcagccccagcagggtgaagataaacagcgtgccgaacaccaccgggtagtcacggttgatcgccgcttcaaagctcatcaggcccaggccgtcgagggagaagatcacttccaccagcaacgagccggtaaagaagatgccaatgaaggccgaagggaaaccggcgatcaccagcagcatggcgttgcggaacacgtggccatacagcacgcgcctgttggtcaggcccttggccttggcagtgaccacgtactgcttgttgatctcgtcgagaaaactgttcttggtcagcagggtcatggtcgcgaagttgccgatcaccagggcggtgacgggcagcgccaggtgccagaagtaatcgaggatcttgccgccccagctcaactcgtcgaagttgttggacgtgagcccgcgcaatgggaaccagtcgaaataactgccaccggcaaacaccacgatcagcaaaatcgcaaacaggaacgccggtatcgcatagccgacgatgatcgccgagctggtccacacatcgaaatggctgccgtggcgcgtggccttggcgatccccagggggatggacaccaggtacatgatcagggtgctccataaccccagggaaatggacaccggcatcttctccttgatcaggtcgatgaccttggcgtcgcggaaaaagctgtcaccgaaatccagctgggcgtagttcttgaccatgatccacaagcgttccggcgccgacttgtcgaagccgtacatcttttcgatttccttgatcagcgccgggtccaggccctgggcgccacggtagctggagccggccaccgcgacttcggctccgccgccggcaatgcggctggtggcgccgtcgaagccttcgagcttggcgatcatttgctccaccgggccgccgggcgcggcctggatgatgacgaagttgatcagcaagatcccgaacagtgtggggatgatcagcaacaggcggcgagcaatataggccagcattcaattgcctccgctcgccgcatcggcgttctgtgtggtgtcgagggataccgctggtttgacgtcgggtttagcccaccaggtcgcggtgccgacgtcgtagcgtggcgagaccttggggtggcccaggtggtcccagtacgcgacgcggaaggtcttgatgtgccagttgggaatcacgtagtaaccaaactgcagcacacgatccagcgccctggcgtgggcgatcagactttggcgcgaaccggcgtcgatcaactcctccaccaactggtcgacggcggggtccttgaggcccatgtagttgcggctgccgggcttgtcggcgctggaggatttccagaactcgcgctgctcgttacccggcgaggtggattgcgggaagctgcccaccagcatgtcgaagtcgcgcgagcgcaggcggttgacgaactgtgagacgtccacgcgacgaattaccaggtcgatgcccaggtctgccaggttgcgcttgaacggcaggaggatgcgctcgaactcggtctgggccagcatgaactcgatggtcacgggcttgccggtgctgtcgaccattttgtcgtcaacaatcttccagcctgcctcttgcagcagttggtaggcctcgcgctgttgggtgcggatcatgccgctgccgtcggtgtgggacggttcgaaggcctgggtgaagacttcgccagggatcttgtcacgcagcggctcaaggatcgccagttcatccgggccgggtaggccggtggcggccatttccgagttttcgaaatagctgcgggtgcgggtgtaggcaccgttgaacaactgcttgttgctccattcgaaatccagcaacaggctgatggccttgcgcacccgcacgtcttggaacatcggcttgcgcatgttgaacacaaaaccctgcatgccagtggggttgccgttggggatttcttccttgatcaagcggccttctttcaccgctggaatgttgtaggcattggcccagttcttggcgctgaactccagccagtagtcgaactgcccggccttcaaggcttccagggagacggtgctgtcgcggtagtaatcggtgatgcgggtatcgaagttgtagaagcccttattgaccggcaggtccttggcccaataatccttgactcgctcgtagcgaatcatacggcctggcttgacctcggccacctggtaaggcccgctgcccagagggatttccaggttgcccttggaaaaatcccggctcgcccaccagtgtttgggcagcactggcaactgccccaggatcagcggcaactcgcggttgttggtgcgcttgaacttgaacagcacgcgcaacgggtcttcggccaccacctcatcgacgtcggcgtagtagttgcggtacagcgggttgccttccttgatcagggtctggaaggtgaacaccacgtcttcagcgcggatcgggtggccgtcatggaagcgcgcttcggggcgcaggtagaagcgcacccagctgttgtccggggctttttcgatcttgccggccaccaggccgtattcggtgatgggttcgtccaggctctgcatggccagggtgtcgtagatcagcggcaggttatccgccggcacgcccttgctgatgtaggggttgaggctgtcgaagccgcccatggccgattcgcggaaggtgccgcccttgggggcgtcggggtttacgtagtcaaaatgcttgaagtcggcggggtacttggggggctcgttgtagagggtcagcgcatgttgtggcgcggcttgggccgcggtgcacagcaacaggctggcgagcagggtagtacgcaaggacatcattgggctttctccgaagctttcagccaccacgcgctcaggcccaggctatagggcggcgtggtgacaaaggcgaaccggttgcggtacgccaggcgatgatagttgaggtaccagttgggaatgctgtagtgctgccacagcagcacccggtccagggcgcggccggcggccagttgttcttcgcgggtctgcgccgccagcagttggtccagcaggtggtcgaccaccgggttggcgataccggcgtaattcttgctgcccttgattgcggcctggctggagtggaagtactgccactgctcaagaccggggctcaaggtctggttgagggtcatcagaatcatgtcgaaatcgaattgatcgaggcgctgtttgtactgtgcgcggtcaacggtgcgcaagcgggcgtcgatgccgatgcgggtcagattttcgacataaggttgcaggatgcgctcaaggttcgggttgaccagcaggatttccagacgcagcggttgcccgtccttatccagtaggcgctgccccgacagtttccagccggcctcgccgagcagggccagggcctggcgcagggtttcgcgggggatgccgcggccgtcggtgtgcggcaggttgaacggctgggtaaacagcgcggccggcagttggtcgcggtagggcgagagcatcaaccactcatggcccacgggcaggccggtggccgagaattcactgttggggtaatagctcaccgaacgcttataggcgctgctgaacagcgtgcggttggtccattcaaaatcgaacatcaaccccagggcttcgcgcaccttggcctggctgaacgccggtcgccgggtattcatgaacaggccctggctttgagtggggatctgatgggcgatctgcgccttgatcacatcgccgcggttgaccgccgggaaggtgtagcctgtggcccagtttttggcctgatgctcgatataaatatcgaattcaccggccttgaaggcttcaaaggccacgtcactgtcgcgatagaactccacttcgaccttgtcgtagttatagaaaccctggttgaccggcaggtctttgccccagtaatccttgacccgttcaaacaccagttgccgcccaggcgcaaccttggtgatgcgataaggcccactgcccaggggcggctcgaaggtggtggccttgaagtcacggtttttccaatagtgctggggcagcaccggcaactcgcccaggcgcaggatcagcaaggggttgccggcgcgcttgaacacaaagcggatacggtgagggttgagaatgtcgacccgggccacttcctgcaggttggtgcggtactgcgggtggccttcggtcagcagggtgcgataggagaacgctacgtcatcggcggtgatcggcttgccgtcgtgaaagcgcgcttcggggcgcaggttgaataccacccaactgcggtcttcgctgtattccaccgactgggcgatcaggccataactggaggtgggttcatctccggacggcgcgtattgcccggtgcccaccatcaagggctcattgagctcgttgacgccgtactgcaggaaattggcggtggaaaccgggcttgagcccttgaaggtataggggttgagcgtatcgaaggtgccaaatgccattacccgcaatgtgccgccttttggcgctgcagggtttacccaatcgtaatgggtgaatttggccgggtacttgagtgtgccgaactgcgcataaccgtggctctcggtgatcgtcgcgttcgccgcaaagctcaaggccaggcttattagtaaaaggaggggacgcttcaagtcagagatccgatccgggcggcttgggctttatgatcggtacagtaacagcttgttccggttggaaaaaggctgtcgggaaggccatgttgcggactgcgagctattgggcggtatgaaggtcaaatgtgggagctggcttgcctgcgatagcatcgactcggtgcctgggacatacaccgaggtgtctgcatcgcaggcaaaccagctcctacattgatttatcttggcccggaaaccaccagcatctggcctggcttcagtgcctggccggtgcgcgggttccaacgcttgagatgttgcatctcgacgttgaagcgcttggccaccatgtacagcgagtcacctttcttgaccttgtactgcaccggttttttcgccgcaactttgcgcgtgtcctgcatcaccagggtctggccgaccttgagagcctggccgttgagcttgttccagcgctgcaggtcatgcacatcgaccttgttggccttggcgatcagtgtgaggttgtcgccactgcgtaccttgtagctgcgggtgcgccctgcaacggccttggtctcgacttcgtcgaacaccggctttttcgggcgcatgctcagcaattcttccggcttcatcgtcgaaagggtgctggtcagcagttgggccttggaggtcggtaccagcagatgctgggggccgtccagggtggtgcgttgtttcaacgccgggttgagctggaacagttcgtcttcgtcgatctcggccagcgcggcaacccgtgacaggtccatgctttgcttgacttcaaccacttcgaagtacggcgtgttggcaatcgggttcaggttgacgccgtaggcttcgggcgccagtaccacctgggacaaggccaggaacttgggcacatagtccttggtttcctgaggcaggggcaggttccagtagtcggtgggcaggccgagcttctcgttgcgctcgattgcccggctgaccgtgccttcgccggcgttataggccgccagggccagcagccagtcgccgttgaacatgtcatgcagacgcgtcagatagtccagggcggcggtggtggaggcggtgatgtcgcggcggccgtcgtaggcgcgggtctggcgcaggttgaagtagcgcccggtggagggaatgaactgccacaagccgaccgcatcgctgcgcgaataggccattgggttgtaggcactttcaatcactggcaggagcgccagctccaggggcatgttgcgttcttcaaggcgttcgacgatgtaatgaatgtagaggctgccgcgttcgccggcattctccagaaaggaggggttgctggcgaaccacaggcgctgttgctcgatgcgcgggttgacgccgacaccgtcctgcaattgaaagccccgacgcatgcgttcccagacatcctggggcacttcggggctgggcttctctgatagccaaataggtttttgcttgatcttggcagcaagattcggtttgggttgcacggtggattgtgcagcgtaatgggtcgattggcagcccgccagagttgcggaaacggccaccgccacggcttgagccaggcgggtcaatgcgtctgaagaaatggatttacgaatagatgacgacattggctggaagtaagttccgggcaaaaatgtcgggcgattctagaaagcgctttggttccggtcaaccattcagaaattacgtatcagattgcatctggttagaacttatctttccaagccctcaagctagcaaacacctcggccccagagcggttgtcgcggccgttccgttcgtccgctttttgtttaacggatgtttcagcggtgcgcaaaaatgggttagtaagtttttccagggccaggttggatggcagcgtcatctcgccacgggcgcggagttgggcgacattttccacccgttcggcgatgtcggcgttgtgcggttccacggcttgtgcaaacttgaggttactttgtgtgtactcgtgggtgcagtacacctgcgtatcggcgggcagggcggccaggcgttccagggagctgtacatctgttcgggcgttccctcgaagaggcgaccgcagccggcagcaaacaaggtatcgccacacagcaacacgccttggtggtaaaaggcgatgtggccgagggtatggcctggcacggcgtacacgtcgaagtcccagcccagcacgttgatgtggtcgttgtcgtgcaaggccacatcccgcgccgggatcttttcgttggccgggccgtagaccttggcgccggtggcagttttcagttgctcgacaccgcctacatgatcatggtgatggtgggtgaccaggatgtcgctgagggtccacgccgcattctgcttgagccaggccagcacgggcgcggcatcgccggggtcgaccaccgcgcagcgttgggtggtggggtcctgtaacaaccagatgtagttgtcggtgaaggcgggtagggcactgatctgtatcattcttcgattcgccaagctgaacacattggtgcatcttagaacgtctaggcgagttggagaatgcaatgactgataaagcgttcgcccaggccgatcctgagtggctggccctgatcagcgcggcccgcgaatggttgtccgggccgattgggcagtttttgctggaagaagagcggcgcatgctcgaagacgagctgggccggttctttggtggctacctggtgcactacggcccgtcagccgacacgccgccctcggcgccgcaggtgcaacgcaatgtgcgcctgggcgcgccgttgccgggggtggaaatcgtctgcgaggaacaggcctggcccttgagcgaacacgccgccgatgtggtggtgttgcagcatggcctggatttctgcctgtcaccccacggtttgctgcgcgaagcggccagcagcgttcgccctggtggccatttgctgattgtcggcatcaacccctggagcagttggggcctgcgccgtgtgttcgcccatgacggactgcgccaggcgcgttgcatcgcgccatcacgggtgggtgactggctcaacctgctgggctttgcgctggagaaacgccgcttcgggtgctatcgtccgccgcttgcgactgccaagtggcagggccgcctggccggttgggaacgccgcgcaggggcctggcagctgtcgggtggcggcttctatttattggttgcacgcaagatcgtggtcgggctgcgaccggtgcaacaagtacgccgcgagccgatcggcaagctcgtgccgatgccgttggccaaggtcaaccgcgaacaacgcgaaccgtaaaacctctttttgatttcaggccgaataaccgatgaccgatagcgtagaactcttcaccgatggcgcctgcaaaggcaacccgggcccaggcggctggggcgccttgctggtgtgcaagggcgtggagaaggaactgtggggcggcgaagccaataccaccaataaccgcatggaactgatgggcgccattcgcggcctcgaagaactcaagcggcgctgcaacgtactgctggtgaccgactcgcaatatgtgatgaagggcatcaacgagtggatggtcaactggaaaaaacgcggctggaagacggcggccaaggagccggtcaagaacgccgacctgtggcaattgctcgatgagcagtgcaaccgtcacgacatcacctggaaatgggtacgcggccacattggccaccctggcaacgagcgcgccgaccaattggccaaccgtggcgtggatgaagtgcgcggctacaagcagagctgaatcagcgacaccgcagcggccgttcgagccgctgcttcactgccgccatcttgcgtggcgagtccaccagcaccgcatcgagcttcaggcaggcagcagcgcgataatcgtcatcgttgttgaccccaatcgccagaatattcgactcgccgttggcgcggaaacagtcgacagcctggggcgtccacagcttggcattcaccgctgaacgggcctcgccgagggtgaaggtttccaccacatccactgtgcgctggtactcgaatgctacccaaccgccgggttgcggaggcggtttgcaactgtttgccagggcgacattggccaggcgttcacgggtctggtcgcgggattcgaacaagcgggccttgggatattgggcaaatgcttgctggtagctgacgtcggtggagtagatccacacgcggtcccaggcgtggtgctgctccaatacgcgggcgacagccgcggcctggggcgcagccggcagtgctttcatgtcgaggatgatcggggtgttggctggaatcgccgccaatgcctgctgcaatgagggcaacgctacggcctgggtgcgataaggaaaggtcacgcggccatccgctgcagcttgcttgaactgccagccagcgttgagttgttgcaactgcgcccaggttttctctgcgaccgcgccgctaccctgggtattggcactcaagtcggcgggtcggtacaacacgggcacgtcgtcacggctcagttgcacggtcagccacagcatgtcgacgttatggtgcaaggcgttctgaatcgccagtagcgtgttctccggaaagtccgccgtgccacctcgatgggctacgatcagcggcagctgggggcctgcgatgtcgggagcttgcgcagtggaacagccaccgagcaggaggctggccaatagcagcgctggcgtgtatcgagcttcaatcattgaggggcacctttggcagcggtgtccggcatactgccgggcaggcctgatgggtaaacgaaaggcaccattatttaattaataccgggttgaatgctaacgggagtgcgggatgtcctctttacctcatgccgatgtccaggcatttcttgacgaagcagtagagagcgagccgcaagggctgacgtacacgccgccacgcatttcacagatgatccgtcgtacgttgccgccttggggtgcgattgagtgcgtgcaggtggcgcatcgcccacatcgctttgaaatgcgccgtgcgcagcatcagtttgcgctgtatcggcagggttcggtcagcgatggcgaggtcagcatcgacggcttgcgcatggctgggccgagggctctggaccagttcgtcgattttattccggccggtgccttattcgaagggtggacgggtgagcgtgccagggtcggctatgccctggtgtcgattgatgaggatcaattggcggcagtctgcccgacctatcgtgtacaaacggatctcaagccgctgatcagttgccatgatgcttttttgcggggattgctggagcgcttggatcaggtcgtgcgtagcggcaaaaccgatgccctgtacctggaaaccctggtgatgctgttgatgcaggaagtgcgttcgctgcaacaactgccggaggttgtgccggtgaataccggtgagttcgggcctgtgcagcgccagcgtttgatcgactatatcgaggcatccctggccaacgaagtccgcctggctgacttgtcgaacatcgtcaacctcagcccttatcatttctctcgggtcttccggcgttcgttcggtatgtcaccgtaccagtaccttttgctgtgtcgcgtcaatcgggccaagcacttgattaccaccactgaccgcagcctgttggacattgccctggacaccgggtttgccggcgccagccagttttcccgtgcgttccggcgcatcgtggggcaggccgctagccagttgcgccgcccctaggcgtcgtacattgcgcaatatgtgtcaacacaacagcaggcaaggtaaagcgtcctgcgaagctgctcgttagtctggcttcaacggtcggttaccccgtaatcgacttcaagccattcgtaagcgtgaggtaataagcatggggattcttcgtaggtgggcactgagtgcatgggtcgcggctgcggttttttccgtcggggccaacgctcaagctacccccgtcatcaaggagcgaggcggtctctactatctggcacctgggtataccgcggctgacgtcgcgaatttctattggcgtagcctgaatggctggtcggagcatccagccgaaatggccaagtattatcagaaggatggcgtttacgcactggcctatgcgccggtcgatgattttccgaatgtgggctttaagcgtgccaataaagggcgccaggaaatgaccgattacttcaccaacttcagcaagcagttgggcaacttgaggtatagcgatcccaagacctggaccttgctccagaccacccaaaagggcacctatgtgtttgagtacagcagcgatggggtgattcgcgccactaacaagccctaccagcagcgcttcatcgctattttgcgaatggccaaggatgggcaaatccaggcggtgcgcgagtattgggacccctacgtggccctgcgggattttggcctgatcaaaaagacccagtgatcgttgcggcttacagggtcagggttgcgcgggcgagttgctcgtccgcacacttatagagcgtgctaatatcccgccccttgaactgtaccgaaccgttgagagctgaaccctgatggccatccgatctgttgtactcgataccgaaaccaccggcatgccggtgaccgatggtcaccggatcatcgaaatcggctgtgtcgaactgatggggcgccgcctgaccggccgccacttccacgtctacctgcaaccggaccgcgacagtgacgagggcgcgattggcgtccacggtatcaccgatgagttcctcaagggcaagccgcgctttgccgaagtggccgatgagttcttcgagttcatcaacggcgcccagttgatcattcataacgcggcgtttgacatcggcttcatcaataacgaatttgccctgatggggcagaccgaccgtgcggacatctcccagcactgcacgatcctcgataccctgatgatggcccgcgagcgtcatccgggccaacgcaacagcctcgacgccttgtgcaagcgttatggtgtcgacaactccggccgtgaactccacggcgccttgctcgactccgagatcctggccgacgtttacctgaccatgaccggcgggcagaccagcctgtccctggccggtaatgcgtccgatggcagcggttcggcggagggctcgggcaaccgaccttcggaaatccgccgcttgccggctgatcgcaagccgacgccgatcatccgcgccagcgagcaggacctggccgaacatgcggcgcggctggaggcgattgccaaggctgcgggtgcaccggcgttgtggacgcaactcactcagcaataaccgctcaagtgggctcgcctgcgaaggtggtctggcagcgttcacctatctatctgacgccccacgatccaaatgtgggagcaggcttgcctgcgatggcggccccccaaatcactggcggattacgggcacaccgagcccaagcgaggtgccgagtggtggggcaagagccctttggttactttgggctgggccggcattccggcttttccaaagtgacccgccgtcagggcggaaccctaagtagccgttaccgcagcaatggatatgtacacaatccaactgtgttgactgtcaggccgctttcgcgagcaagcccgctcccacagttggatcgcggagtgtcaggtagacagatgtcggctggcaggccgtcatcgcaggcaagccagctcccacagtttgatcgcgggatgtcaggtaggtatggcccagctcgcaggccgtcacgggagcaagttccctcgccagaggttcagccccgtaccgaagttatgtagatacctctcgaccgcctgtgaaatcttcattcgccacttttgcttccagcttctacccttgtgcaaagcctccagagtaagagtgctcatgtacaaagacctgaagttccccgttctgatcgtgcaccgtgacatcaaggccgacaccgttgccggtgaccgggttcgaggcatcgccagggagttggaacaggagggcttcagtattttttctgcggtggactacgccgaggggcggctagtggccgctacccatcacggcctggcctgcatgctgatcgccgccgaaggcgctggggaaaacacccatctgttgcagaacatggtggagttgattcgcttggcgcgcctgcgcgcacccaacctgccgatctttgcgctgggcgagcaagtcacgctagaaaacgcacccgccgatgccatgagcgagctcaaccagctgcgcggcatcctatatctgttcgaagacaccgtgccgtttctggcgcgccaagtcgcccgcgccgcacgcacctacctggatggcctgttaccgccgttcttcaaggctttggtgcaacacaccgccgactccaattattcttggcacacccccggccatggcggtggcgtggcctatcgcaaaagcccggtggggcaggcatttcatcagttcttcggcgagaacactctgcgctcggacttgtcggtatcggtgcccgagctgggctcgctgctcgatcacaccgggccgttggccgaagccgaggcccgcgctgcgcgtaactttggcgccgaccatacgttcttcgtgatcaacggcacgtccaccgccaacaagatcgtctggcattccatggtggggcgcgatgacctggtcctggtggaccgcaattgccacaagtcggtgctgcattcgatcatcatgaccggcgcgatccctctctacctgtgcccggagcgcaacgagctggggatcatcggccccattcccctgagcgaattcagccccgagtcgatccgtgccaagatcgacgccagccccttgacccgggggcggctaccgaaagtgaagctggcggtggtgaccaactccacctacgacggtctgtgctacaacgcgcaattgatcaagcagcaactgggcaacagcgtcgaggtgctgcactttgatgaggcctggtacgcctacgccgcctttcacgagttcttcgccgggcgctatggcatgggcacctcgcgcacgccggacagccccttggtgttcaccacccacagtacgcataaattgcttgccgcattcagccaggcgtcgatgatccacgtgcaggacggcggcgcacggcaactggaccgtgaccgcttcaacgaagccttcatgatgcatatctccacctcgccgcaatacagcatcatcgcgtcgctggatgtggcctcggcgatgatggaaggcccggccgggcgctcgctgctccaggaaatgttcgacgaggccttaagttttcgtcgcgccctggctaacttgcgccagcatatcgcggccgaagactggtggttttccatctggcagccaccctcggtcgcgggcatcgaccgggtctccacggcggattggctgttgcacccaggggatgagtggcatggctttggcgacgtggtcgaagactacgtgttgctggacccgatcaaagtcacgctggtgatgcctggcctcaacgctggcggggccttgagcgagtgcgggattcccgccgcagtggtcagcaagttcctctgggaacgcgggctggtggtggagaagactgggctgtattcgttcctcgtgctgttttccatgggcattaccaaaggcaaatggagcaccttgctcaccgagctgctggagttcaagcgtagctacgatgccaatgtcagcctggccagttgcttgccgtcggtgtatgcccaaggcccggcgcgttatcaagggctggggctgcgcgacctttgcgacctgttgcacagctgttaccgtagcaatgccacggccaggcacctcaagcgtatgtatacggtattgccgcaaatcgcgatgaaacccgcggatgcctacgatcagttggtcaggggcgaggtggaggcggtctctatcgatgccttggcaggacgcatcgccgccgtgatgctggtgccttacccgccgggcattccactgatcatgcctggcgaacgcttcaccgagtcaacgcgttcgatcatcgattacctggcatttgcccgcacgttcgatagcagctttcccggttttgtcgcggatgtgcatgggctgcaacatgaagatgacggcagtggccgtcgttacaccgtcgattgcatcaagggttaaggaagtttatgcaagctgtgatgaacccgaagtatccagggctcagtgtgcgagtcgccgacgaaggttttgacgcctatgtgtggggcaacgatttcagctttgaagtcagcgcctatggggtgccgcaaatgggccagcgcgtcgaacaatggccggtggagcgcgtgctgccgtaccgcaagtgctatggcatcgacccggaagaattcgccagttttcgtgatgccgccgacagctcgatcttcatggcgtatctggatgaccgcgcagtggggcatatcgtggtcagcaccaactggaacggtttcgcccatgttgacgagttggccgtggcgttaccggcgcgccgacatggcgtggccaagtcgctgttggacgtggcgcagttctgggctcgcaagaagaacctgccgggcatgatgcttgagacccagaacaacaacctcggcgcctgtcgcctgtatgagcgttgtggctatgtaatgggcggcatcgatcaactgcgttatcgcgggattgacccgcaaacccgcgaggtcgcgattttctggtatcggttgttcaaagcagaagcggactgatctctgtaggagcgagcttgctcgcgaagaacgtgaacgatcacacgctcatcctgatgtaacgcggcgcctgtgggtttttcgcgagcaagctcgctcctacaggggcttggtgtcgttaccaagcaggctttcggctttctggatgacgatctccagcagcgcattcaatgcaggggaggccgcagcgtcttgcaaggtcagcgcatacaggctgaccactatcggtggtgacaccgggcacgcatcaagcccggactcgcgtgcacccaaggcggtgaacgggtcgacaatcgccaggccttctccggcttccaccaggccgcgcatcatcgggtaggtctgtacgcgcgtctgcaccacaggcatcggccgcagggcatgcagcttggcgtccagcaaacggctgagcggatcatggccttcaaggccgatcaacgattggccggccaactcctgcagcgcaatgtacttttgcttgggcttgagccagccatggggggccagcaactgcaatttgccttgggccagcaccgtgctctggatatgggggtgttctgggtcatgcaggctcaggcccacgtcggcttcatgcaacagcaggctgttgatgatctcgccaactggctggctcgacaggttgcacggcatgtcctggaagcgtcgacgcagcgcggcaatgctctgcggcaacagttggttggccagcggcggcgtgcagagggcgcgcaggggcggagcatgatggtgtttcaagcggctggcaaggcgttgcaacggctccagggcttcatacagagttgtgatttgtgcctgcaactccagggtttcccgcgtggcctgcaagcgcccgcgcacgctggcgaacagcatgaagcccagttgctgctcagcatccttgagggtggcgtctacgtcgcccacggggagttgcaaccactcggcggcggtgccgaggtggccggtctgcaagatggcctgaatcacttcgatatgacgtaaacgcatggccggagtctatgtgcagtgcgcaggggtttcaatggcgcaggcgttcgtgcgcaaaaaagactgccggggtcgtcccggcctatggcgctcagccaggaccccattagaatggcgggtctgatcagcaacgacccctgccggtttcccggtacttaaaataaaaaacaggtctggtctcatatgcctctaccctcgacgttcttcggggtaacggccaagcaactcgtggtcctggtgaccgtgggaggcctggcggcttacttcttcaatcatcaggatgaaccgacgccggacaatcttgcactggaagcctttattcgctcccagcaacaggtgggcgagcaggtgggcgcagtagtggggattaccctggtcagggaggtcgaggcttaccccgcgtacaacgcgccgggttacaagcgctcgatgtatacggtgcaaggggagcgcggccagttgctggtgacgctcaagcaaggcgagcagggcatagaggtaacgcagatccgccgcccatgagcgttcccagcccagtcgccaggactgagcaggtgaacaaggcaagcgcttacgatgccagagtggttgcggactcgcgcacgagaataatgcccgactggatcagtttgaattcatcaccttccagcttttctacacggtcgccaatggccagcttgtaggtcgtggtgggcgtcgatcccgccaggtcgccttgcgccgggttggattcctggaactcatgcaccgaatacacgcggccttccgcgtctctggcatgaaactgtccaacaagtactgcagccatctgtttagaacctctggagataaacactcgatttgcggttctgtagaccgtcagggagcggggtagtttacctataagaaaaaaatactattcgctgatattttcagacgcttcctacgcaagtgctggcaaggaaaacgtcgagggaatccgcataaccctctggtgaacgcgttgcgaagcctctataactacaagctcctttattcagaagtcgggaaacctcaatgagcaaggtctacacgattgccgtcctggtgggcagcttgagaaaagagtcaatcaaccgcaaggtcgcgctggccttggccgaactggcccctgccaatctcaagttgaacattgttgaaatcggcgacttgccgctctacaacgaggacatcgacggtgcaacgccgccagcagcctacagtactttccgcaaacaagtgagttcatccgacgcggtgctgttcgtcacccccgaatacaaccgctccgtgccagccgccttgaaaaatgccatcgacgtgggctcgcgcccttacgggcaaagcgcctggagcggcaagccgggggcgatcatcagcgtctcgccgggtgccatcggcggctttggcgccaaccaccatctgcgccagtccctggtgttcctggatgtgtggtgcatgcagcagccggaagcctacctgggcggggcgggcagtgtgttcgatgaggcggggaaggtgtcggacaagaccaagccgttcctgcaggcgttcatcgatgcctatggcaagtgggtagaaaaacagaaaggctgaaattagcccggcagctgtaggagcgagcttgctcgcgaaaaactcgaggacaacgcgttcattcaggatgtcagcgttgtcgttacggtcctcgcgagcaagctcgctcctacagtagggggttatcgaagccagttggtgcgtgccagctctatgacctcatcgccacgcccgctcatcaccgccttgagcatatacaggctgaaccccttggcctgttccagcttgatgctcggcggcatcaccagttcctgagtggcggtcaccacatccaccaacaccggtccatcatgggccagcgcacggcgcagggccggctccaggtcttcggattgctccacccgaatgcccaagatccccatggcattggacatggccgcgaagtccgggtttttcagctcggtgccagtgtccaggtaacccgccgccttcatctccatggcaacaaagcccagggacgaattgttgaacaccaccagtttgaccggcaattgcagctgcgccagggaaatgaaatctcccatcagcatggtgaaaccaccgtccccagacatcgagatcacctgccgtccagggaatgccgcctgggcgccgatagcctgaggcatggcgttggccatcgagccatggttgaacgagccgatcagccgacgcttgccgttcatcttcagataacgcgccgcccacacagtgggtgagccgacatcggcggtgaagatcgcatcatcatcggccagctcgctgagcaagcgcgccacatactggggatggatcggcctaccagccttggacggttgcgccaggtcatccaggccttggcgggctttttcgtagtgcttcagggaggtgtcgaggaagctgcgatcggtcttgcgggtcaagcgtggcagcagcgcggcgatggtttcactgacgtcggcggcgatgcccaggtccaaggtcgcacggcgccccagggcttgtgggttgcggtccacctggatgatcttggcgtcggtcgggtagaactggcgataggggaagtcggtgccgagcatgatcaaggtgtcgcaatcgagcatggcgtggtaaccggagctgaaaccgatcaggccggtcatgcccacgtcgaacgggttatcccactccacgtgctccttgccccgcagtgcatgcaccaccggcgcgccgagggcgtcggccaatgccaccacctgatcgtgggcaccggcacagccgctgccacacagcagggtaactttctcgctgctctggagcatgtcggtgaggcgctgcaggtcctgctcgaccggcacggtgcgcggtgcgtgcaaggccggccacggcttgagcttatcttccacctccaacagcgatacatctcccggaatcaccaccaccgccacgcctcggttgaggatcgccgaacgcatggcacggtgcagcacctgaggcatctgcgcggggttgctcaccagctcgataaagtggctgcactccttgaacagttcctggggatgggtttcctgaaagtaattcaggcccacctccgaggacggaatttgcgcggcaatcgccagcaccggcacatggttgcgatggcagtcgaacaacccattgatcaaatgcaggttacccggcccgcaactgccggcgcacaccgtcaactcgccggtggccgccgcttcggcaccggcagcaaaggcggcgacctcctcgtggcgcacatgcatccactcgatgctgtccatgctgcgcagggcgtcagtcaagccattgaggctgtcgccggtcagcccccagatacgcttgatacccgcttgttccagggtggtcgccaactgctgcgccaagttgattttcgccatgaggaactccaatcgtcagtgaggttgaaaaactgctgatcagtaggggacagttcaatcacggcgaatgctccgcctttaatgtgaagattgcgtcatgcttgcactcagtgatgcataccttcataagccctgatcagcggcacaaaggattacgcgggagctgttgcttggctgtgagcaatcgcgatgctggcgtgggccagtcgctgtcggcatcgaaacgtgccatccagcggcggctatcggcgtcggtaaagcgctcatttgggtctccgtcccattggccgaagcccagtaatcccaagtcgtcataacggatgggcttgagcagcctgttcaagagcatgggcagttccggcacgccgtgttcgacagggtataactcgggctgttcgcccagctcgatccactggccgctgtgcagttcgatgacgctgatgcaggggtgagcgagtgcgctacgtacctgttcgcgggtcaggtcgagcttttctcgccagtgatcggcgagcaggaaggcccaggtcggcggtcggatgccgctaggcagttcgtcgcgcatgccaaaggggtactcaatatcaagcccgtagaaagctggcgtgagcgctcgctcccaggtagtgacttccgcccgggtgccatattccattggattggccatggcgaagccgctgtagacctggtgagccttgagcaggtcaatggtcttgaggacgaactggcgccaggcatcgcggttgtccagccaccattgccagcggtaatagaatgagatggaggagtaattgattcgagctccgtcagcctggaaccgcctgcgccagaaatggcctgcggtcgtaggggaagacgcatgattcggttcgtcggtgaaccagaaaacgaaggtctcgcttgggtgagactccagggcctgcctgcgaagatcaggctcttcttccggataagcatgagggcgctctgcctccgggtgtatcgtcatggtgtaggggtagccaagcagttgctcgaaggcttcgtggatatccaccatcagcagggcgatatctcgatggttgtcaggggtaggggggaagtagaagctgatgaaggggctgacgctgtgcgaagctagctcagtgccggattcggagtttggccactctttcaataactcgataaagagatctttttcttcaacggtaaacaattggtgtgttgtactcattttatttctttttccttgcttgttcactgggagtagatttcttcttgtctgcgtcaaagccaacgcaatcctccggcacccttaaaagcgcaaccttctccttgccaaccttgttcggattgatgcctgtttgcggagtcatgagcagcacgtaatgatcgagttgttcttctctcacccaatcccccggaaacttgatctccaccgccgcaaacacattctcggtttcaaacggctcttgccggtactcaaccaccaccagatcaggcgccagcaaacccttcggccgtggccaaaaaggctgcacggcactgccgaaccgtttgggccgcgtaaccggctcgcccaacaacgccttcttgctgttgccgttgtagttgggttcggccttgagcgggctgcgccactccagtgcctcgtccacggcttcaaaaaacaacgaggcggtaaattgtttgagggcgatctcgatggtggtcggtaccgtatcgccggcaattttcttgcggatacggcgcggtaccttgatcggcatctgcagcgcaacggtgcagacttggctgatcgccgggcgaaagggcactttgcgttcgatgtattccttgaacgtgatgttctcctggcctcgtcgagaaaccgtgctattaccgccgcgatccaccacggcaaaggtggaactcttgacctcgatctcgcgggtcattgcttcaatggtgacgcgaagggtttccttgatctgcttcctgcgctcggcaatttccaccgcgagttgggccagttcggcggcggttctgctgttctcaaaagcctggtttgcccgataggcgcgataggcaccgtcgatgatccgcgcgacggctggagctagtgggcctggcatcagtcgaggtctccactgtgttgatccagaaagtcgtcggggaaaatcgccttggcctcaacgggggtgccttgatcatcaagggccatcaggtagggggcccacgtttcggtgatttgctgatcgtcgcgcatgattgccttatgggcctgcacgggtttggctgccggcgtcaccgtccactcagtgccacccaaggggcaggtgcgcccttcggcaagcagcgccgtgccatcggtgatgcgataccgatagcctgcgaaggcacgttggtcgttcttgagcaacgtgtagcgccccaggaacggtcccggcggtacggcaggcagttgcggagtgccgagtgggttacccgttccgatcggatctgtggtcacagggcctttgattctgatggccagtccatcgagcgtgatgccattgccatcaatcgtgatgctgccgccgggcgctcgcagaataaggcgctcgttcgatgcaacatcgaacactcgggttttttgctcaatgcgctgtcctgcgcagaggcggtaatggttgcgtactgattgttcagcattgccgccgatctgcacctggtggtcagcggcgatcctgtcatgccgattgttggcaatttcttcgacgcggtctccaccgatgtcgatgtggtggttgcgccctacagtgtgtatacgatcacggcccacttgcagatgctggtcttgagcgacagcaatgtcttcatcgttgcccactcgttcgctgcggtcatgaccgatttcgatgtgctcgtcatgcccgacttgttcgcttcggtcgtttcctacgaaggtagtgttgttgtgcttgatgtggacgtttttgtctttttcggcatggatgaacacctcctgatggcccaactcatcctcaaatcgcagctcattgaagcctgcacccttatgggtttggctcttgatggtcatccgcgtcttgtgtttgggcagctggtacggcggcagattggtctcgcggtaggtgcggcctgtggcgatgggctggtcagggtcgccatccagaaaactgatgatcagttcctgatccacgcgcggcacggccatggcgccccaggtcgcaccggcccaaccctgagccacacgaatccagcacgagctctgatcgttgtttttgtccgagcgatcccacggaaactgcaccttgacccggccccattcatcgcaataaatctcttccccaggtggcccaaccaccgtggcaatctgcgggccatcgatgcagggtttggcacgcagtggcgccttccaatccgaggtccagcgaatggcggtggcggtcatttcataagaggtgccgtggccgctgccgaacgcctcctcctccaggctggtgtgctgtttgccttcgtgggtgatggcgatggtgcgccagcggtcattgaagtcttcgcggggatgctcgttgaggtcgaacgccagccccggttgcaggcgtgcatcgtcaccggccaggtgcgccagtttggcgtcattgcgcagggcggtcagccgggnnnnnnnnnnnnnnnnnnnnnnnnnnnnnnnnnnnnnnnnacgtcctggatgtcgtcttcggtcatggccttgggtttggcgaacatcttggaaaaactgcccacatccagcgcaatagccgagggtgccaacgcttgttgaccgaggttggccatggtctgacggcccggatggctgagctgtacccagaagtgcacacccttggctcgggctacgtcggcccattcacgaaaactggccaggtgttgttcgttttccagcgcgacaccgccagggccggtcatggcgcggcggtcgatcatcacgttaccggtcagcagcaggccgggctcaccgtcggcccaggtcttgtacagctgcttgagtgcttgggacggcgcctgatgcaggtccgccatgttctcttccatcgcggccttggcgatgcggttggcaatgacttggccgttgggcagttgcagcgattcgaacggtgacatgggttaactcctgagcaggggaggtctcaggctaagcttaaagttaactttaatgtcaagcgggagtcgatcacacaggattgacgggcgatggagctgtaggagcgagggggacgcctagttcttgctcgcgaaaaactcgaggacaacgcgttcattcaggatgtcagcgttatcgttcaggtttttcgcgagcaagctcgctcctacagggacaggagcttagcggcggcggaacagcggcaaaggttcatcggtggccgcttgataggtcaccgagaaatccttgaggctttccagcgcttcgtacgggtctttgtccgcgcgcaaggcgaaggcatcgaacccgcagcggtgcaggtagaacaattggtcgcgcagcacgtcgccaatggcacgcagttcacccttgtaaccataacggtcacgcagcaggcgtgcgttggagtagttgcgcccgtcggtgaaggcggggaagttcagggcgatgacctgaaagtgctgcacatcatcaccgatttcttcggcttcttcatcggcgtccagccaaacacccaaaccgccgtcgcgggccttgagcgcgtggccgtgctcgcgccacagtgccagcggcacgatcaggtcgtcgcagttggagatgccgtcgaagctcgcgtccttgggcagcaggtgccaggtttcgtcgacgactgcgttgttcttaatgattcgctgcatagacacgctccttgaacaggtcgatgccgatgcgctggtaggtgtcgatgaagcgctcatcttcggtacgctgttcgatgtacacgtcgatcagcttgccgatcacctccggcatggcttcctgggcgaaggatgggccgaggatcttgcccaggctcgcatcgcggctggcgctgccacccagggacacttggtagaattcttcgcctttcttgtccacgcccaggatgccgatgtggccgacgtggtggtgaccacaggcgttcatgcaaccggagatgttcaggtccagttcgccgatgtcgaacaggtagtccaggtcgtcgaaacggcgctggatcgactcggcaatcgggatcgacttggcgttggccagggagcagaagtcgccgcccgggcagcagataatgtcggtcagcaggccgatgttcggcgtggcaaagccgccttcgcgcaactcgccccacagggtgaacaattggctctgttcaacgtccgcaagaatgatgttttgctcgtgggaggtgcgcaactggccgaagctgtagcgctcggccaggtcggcgaccgcgtccagttgcttgtcggtgatgtcgcctggcgctacgccggtaggcttgagcgacaaggtcacggccacatagccgggcttcttgtgcgccagggtgttgcgcgtgcgccagcgggcgaagcctgggtgttgctggtcgagtgcggccagctcggcgtcctgattgctcagggccttgtactcagggtcgacgaagtgcttggcgacgcggtgtacttcggcttcggtcagggtggtctggccgccgcgcaggtgttccatttcggcatcgactttctgggcaaacacctcaggagtgagcgccttgaccaggatcttgatccgggccttgtacttgttgtcgcgacggccgtagcggttgtagacccgcaggatggcgtcgaggtagctcagcaggtcctgccagggcaggaactcgttgataaaggcgccgaccaccggggtacggcccaggccaccgccgaccaatacgcgaaagcccagctcaccggcggcgttgtacaccggctcaaggccaatgtcgtgcacttcgatggccgcacggtcggaagtcgagccattgatggcgatcttgaacttgcgcggcaggtaggcgaattcagggtggaaggtggtccactgacgcacgatttcacaccacggccgtgggtcgatcaactcgtcggcagcgacgccggcaaattggtcggtggtcacgttgcgcaggcagttaccgctggtctgaatggcgtgcatctgcacagtcgccagttcagccaggatatccggcacatcttccagggccggccagttgaactgtacgttctggcgggtgctgatgtgggcatagcctttgtcgaagtcgcgggcgatcttggccatcatccgcgtctggcgcgacgtcagttggccatagggtacggccaccctcaacatcggcgcaaagcgctgaacgtaaaggccattttgcaggcgcagagggcggaactcttcttcgctcagttcacctgctaagtagcgtcgggtctgatcacggaactgcttgacgcggtcctcgatgatgcgctgatcgtattcgtcgtatacgtacatataggtcctgttctcggcaaatctgcgcgcacggccgcgcactcccaacggagccggcgcacgataccagtttgcgtatatgcgcaaaagtgatgtttgggtatatgtaaataaccaaactgactaatgagaaccgttatcgccatacccacatttgtcatggggacaagtgtggtctttactgtgatcgagtctgagtgcagtcacctataaaaccgacaagaggcgatgcgatgagcaattccaccaaagcccgtaaacccgacagtaccgtggacgcctgggccattttatttttgatcatcctggtggtgggaaccgccgtgttctgggttagccaccagtaaagcagcaggttgattgagcctcgattgaatatctaattgccactatcatggcgctctatattcaaggttcaggcaaccatgttgaaggttctgatggcgtgtgtgtggttgctggggtcggcgtacggggcaatcgcccaggctgcgtcggtggtgtttctcaaccctggccggtcttcggaaaccttctgggtcagttacgcgcaattcatgcaggccggtgccaaggacctcggcctggatttgcgcgtgcgctattccgagcgcgacaaccaaaccaccctggcccatgcgcgggaggcactgctgggcactgaacggcccgattacctggtgctggtcaatgaacagtacgtcgccccgcagatcatgcgcatggcccaaggcagcggagtgaagttactgatcgtcagtaacgcgctgacgcccgaccaggtgcagctactggacgcctacaacgataccggcttgatcggcacgatggttgccgacgacgagcaggcgggctacctgatgctcaccgacttgatgcgccagcacggcccggtcgctccgggcaccccacttgacctgctggcgttttccggcgccaagaccacgccggtcgcgcaactgcgggtacagggtatgcagcgtgccctggccgagcaccccgaagtgcgcctgcgccagttggtgtacggtgagtggagccgccagcgcgcattcgagcaggccagccaactgttcaagcgctacccgcagaccgcgctggtctggtcggccaacgatgaaatggcgctgggtgccatgcaggccctgcaagacactggccgcgtccccggcaaagacgtgttgttcagtgcggccaacagctcacctcagatcctcgcggcacgccttgatgggcgcctgagtaccctggtggcgggacatttcaccctgggtggctgggcaatggtgttgatccatgatgaggccaagggggtggatatcggcgcccgtggcggtcgcaaccgccagcaggcgttgttccagttgatcgacgccgcccaggcacgccggctatcgggccccctgccatcggtggattttcgcgcgttgtcagcggtgggcaagcccgcgtcctaccgttacccattcagcctgcaactgttgctgcgttaaaccccggccaggtgcagcaccagcttgacgatgccaaacagggtcaaggcaaacaccgcggtgaacaggatacccagcagcacaaagtggctgggcttgccgtgggtaaagtcgcgggcgcggttcttgccactctgtacaccaaaagccgctgccatgacgctgtgcaccatctgccagaaggtgggtggtttgttgtcagtaggctcgtccatacagccctcgtctgcaaggtggtcctagagagcatagacaacccgacggcgtctgctcatgtcacagtacctccagcccaagaaacagctcctggtccagcggcggcctgatttcggctttttccaggttcaccaccgcgcggttgtcggagcgcgcctgttcgatcagttctctgcgggtgaagcggcgctcggcgatggttttcagatggccgaatgccggtgtggagggcggggtatccgcggcggggtagtggaagtgggcgtaccacaacaccgtttcttcgccccgttggcccgcgttgatccggtttttgtcgcggattgcatactccgtcaaaaagtcaccggccttcaaactgacacggctgcgtaccaggttgatatcgacaaagccatgacgccataggtaggcgacattggcggctttggggcgctgctgtttatacccttcggcgcacactgtgcgggcttgctgcgtggcggcgttcgcctcagccagataggcattgcgcagtgccataccctcgtcattggccttgtgatcacgcgtgagttcctctgcaagggcttggaactttgctgcatgctggctcagcatcacatcccactcatgcgggtcgagtacgtcgcgtcggctgggatcctcaagcttgcgctgttggaagcgaatgcttgcatcgatacccgtgcgttcgtccctgacggtttgtccctgcgccttgatcattctcatcgtgcgtaccgcaggcacagtaggctggggcggtcgcgcaggttccacgatgttccacacaccttcattggcgtgttcgtgataagtggcgacggtttgcccggtgagggggttcttgatgtcaacgaaactgccttcgacaccaggctcgctcgggcgcaggtcacccacaagcgtctcttggttacgggttctgatgactctgcggctggccggtctctgccgggcggcgcgattggcggggcgcctggggacaaagccctcttcagacaggatcaactcggccagttgcgcctccaacgcagtgcgggccaggctgaactgctccaggaacgaggctctatattcttctcgcacaagttcggaacccatttcagataacgaattaacggcgttttccaggcgaccgtactgctggagtgcatccctgagtacatccatttgttcagccggtgagtaaccgctggtggcgagcacttcggtatgagtgagtatggaagcgctcgctcgccgatcggtgagcacttcaaggaaagggtgctccttcgggctatcggtgtcgcgggcgcggtcgatgatcaactcaacaaacgccaacaacagatgctgctctataacacgcgcagaaatcgtgtttttggaggtgattttgcttgagagcttagtcctcattgtcgggctggtctgtcgcaaaatggcttccgttttttctgcaatcttggccatttccttgagcagtttcagccgctgtgttgcaccgctgatgaactgctcataggcgtccgtgacgtggttgggcagttctgcgtcgacccgtagcagtagctcgggaagactttcgccgcgcccggtttgcagcgtgttttggattttctgatgcagtgttgaatatgaaaatagtaagtgatcgtaaatattttcggtcgcgacatcttgtacctgtttgtattgaacctgtgttctgtccagttccagcagttctcgggccattgccagagagctttcctgcgtcgaaaaatacacttgtgtgttttcatggtagttgtcgacggcgatgttccaatcggttgcggcacgtgctgccgagcgttgcctttgctcatggcgctcaacgattctggggcgcagggcggcaaataatgcagggctgtcgagcctttcccagtcagctcgcaaggcttgtttgtgttcgatgagttgggtcctggcgcgacttacggcatctttgagctgttgcgcctgaggcgtcaatgcacttgcatcaatgctcagggcttccaatcctgaactcagttgctccaatttttccctgcgttttttttgccactcgcttagccgttccctgggcatgcccccctccagcctggcatgccggtccaggcgccaatgcccctgaccgtcgctgatcaacctgaaacccggacgctgcgggtgctgcggatgtaccagatagacctcgccaaaccccggcacaatgcttacctggaacagcaagccgccgacgctggcatgccaggtcccgtcgatgcggtaaagccccttcagcgcaccggctggctgcggcgcgggtaaggtttcgggccagggcacatgcacttgaaccagcgccttgagcaactgtgcgctggccatggggctggcaagcgagcggctgaagtcaagggcggtatggcccgtggccggaggctctccggggagtgcgaccgggccattgcgtaccggcacggtactctgcgttcgtggcaggccggcagggcgccgccaggtttccaggtgcagggcgtggtcctgcgcagtaggctcccggagcggttgcgccgagggcgaggcggcgtgtagcaatatcattgcggtattgagcaacagatcaatcaacgccagctcgcgggtggtcgaatcatcgctgtccaggcctgccaggtcttgcgcaaggctgctgaccagtaccatgaaccacccaaccagcatcgccgggccccgtaccagtggcagcaacagggtgttgaacagtaaccaggcgccttgcatcacaatggcccagcggctttcgcggttggacaccgactcgcggtcggccaggtccacgagcgcccgtgccgtgctgccgaacaggtggttgagcaactgaccgttgatctgcgactgcatccattcatcggcaccttcatcgacggccagggtggcgggctcgggtttttcaggcacgctgaactcatctcccggcaggaagcgaatgaggtgaggttcgcgaataccgccgtggtcgtagatcgggcgggccgtgtcgctcagccagatcagcacgctgtcttgcaacgcgccggggctggcgagggcatcgagcagcgcctggcgggtggggaactcatgcagcgtatcggcgtacagcggttgatagagcaggtgcgggccgatacgggtatcacgcggttcgatgataaacgtattgcagacttcatcaggtgtggcgccggccttgcggcacagcgccagtgggcgcaggacgatctcctggccgtcgacgtagcgatccagcggggtttcacccatcaacgccttcacatagcgatagcccgcgatgctgacgccatgctgccggcgcatcttgtattcaagcgcctgcattggcagcttgaccttcagctcccgggtaaacagtgcttcgcgtcgtcgcgcatcggcggtgtcggatagcagcgtgtccttgattttctgcgggtaggccgtgccgatatctacgcgttggatcagtcctgtggtgcccagcaagtagtcttctgtgagccagaccggcaaagcctgggcgcctttggccaggattttcaacgtgccactgggtttgccggacaggttctttaccgccagctcggtcagcgacaggcgcacatgttcgacaatacctgcaccgcccgggtagccggcactgacgatgaagtcgagcacgacctcgtcgggatcgcagtcgccgtgatcggtttgcatctgtttgcgcaaggtggtgcggctgaagctgtagaggtcctcgatcccttggttgaacgattgcccctggttctgctgcagcacctgagccatgtcctgcaggtggcggtggtaggcaaagcggtctgcgctatcagcctggctgagccagtccggcaatcggtcgctgacattttgcaacgtcggggcggcggggacgcgcacctgggtaaagaaaactgccgggtcagtgagggtttccagacgcctgcccagggcggtttcctcttgcccctggaacgtcagcgtcgcgaggtcttccaggtgttggttgagaatcaagccggcttgttgttcgaagacgttgccgttcggttcgttgcgccgccaggtcaggctatcgaacgcaaagcgctcgcgcatcctcgtcgcccaggcttcgccgaaggcgtcgatcgagtcgaaggcttcgatggtcccggccaggctgtacagcagcacctgtttatcgcgcatcagcagcaggtcgggtgtcagcaggagcgcttccttgccggcgctatgaaaggtgttttcgatgaagaagacataggtggcgggggtagaacggggcaggcgctcctgcaataccggccaggcggcgacaaccgccagcatgtcgcgttgggtttgattcaaggtggattggcgcgctgctgccgcagtcatttggccgttgagaaactcggccaaccattgccagcggctgctgtcatggctgtcggtttcactccaatagtccgccaggtcatgctgccagtgcagggacagcgactcgggcaggtcatcgaggatgcgtgcgatgacctgcatgtcgatcagtgccggcgcctgtggcttgaggatcttgggggcttgctgggtcaggtagtaaggcagttcgcgttgtgggtgcaggtccagcggttgcgggttcaatgcatgggctatcgccacttccatcaacgaggggtaggtgtagtgcccctcagggtgaggggtggccagcttgaccgcgcgcaggtccagttgcagcgtggggtagtgttccagaatgcgcctgcgcagggcattgaacaccaccgaatacaaggccgggcgcgtggcgaagcgggcatggaccgcttgggcgggcagttgctcaagggctgtgaagggcgagggggttgggttgggcatgcaaagtcctttgtctgtattgattcaagggggcggctctatgggccgaccagcgatagcaaatccaattccgtcacgttgcggacggtatagggataccgccgctactgcgtggccccgcgcgcgcgacatatgcacctcttgaggtgacggcccgcgtgatgtgctgacactccatttcaaaggagtgacacgatggctgatgcaacccaaccttcttcgcctgctgcgacgcagagcctgcatggcgatttcctcgaacacgccagccctcggtggctgatcgacgccctgcctgcgcgcaggcaagcgctcaaggacgccaccacatcgccgcccacctggcttgagaaagcctcacctgcgcaacgcgaggcggtggcggccagctttctggaaagcttcagtgcacagacgcagttggacaaaaccatggccagcttccaggacgtcaacgacttcgccaggcccttgctgctcaaggcactgaaggatcagtaccaagtagaggtcgacgtcgataaaaccttgctatgcctgcgccggccgctggcgattggggttctccagacagaaatctcggacttccagttcctgaaactgtcgatgctggatgcggccttgcacaatttcgaggctgatgagtgcaaggaaggggcttaccacaagacttcggggttcgtggaagcaaccgacacccccggcacctaccattcagtcacggtcaaccttaaagtcagccagttcctgagcctgtgccgtagcctggatatcggcgtcaagtaccaagcttatctgcagacgtttttttaccctgaggaggggcaggcgcaagcgaccttgcgcgagcattttatcgccagccagaaggctgcattgaaggccgccgccgagcaggccgtgttgaccggggatatcctgcccgccgaccagcgcatgatcctgtcggtgatcgagggtgaaattcatccgtggatgggcaacaaacaagtgtggttcaggaccctgggcctgatgaagctcagaatgaccggctgcatggtgtttttgatctgtaaaaaatacacctaccccaatgagctgatcatctacattccccaggacccggtgcacccgctcaagcgctacacttgggcgcagatggaagcgcaattcaagcgtctgttcaccgagcgcgatgcggctaaacctgctgatgcgacaccgacgccgtaccaggcgtttttcagccggttcgtaccctatgaaaaaagagcgtattacttcagtcagttcacccagaaagccgccgattcgcccactgacatctggcgctcgccctggaaaaaactcctggacttcaccaccccgcacttcatcaccggcatcaaggagttgccgcccgagaagccagccaaactggaacccaacaacgacccgtatctttcaccttccacacgtacccgggccggcaagggcatctgggcggcgaacatcgacccctggaagtacttttatgagcaacatcgcgagcagttgatcaccgacgcccgcgcccacgcagtgcctgctgccgatgtggatgccaaggcgcgtgaggccaagcttgcgcacctgctggagatcggcatgctcgggctgaacatggcctcgatgttcgtgccggtgctgggcgaggtaatgatgactgtgatggctggacagttgctgtatgagacgctggaaggcgcggttgaatggggcgaaggtgacctgcaagcggccaaggcacacctgatcgacgtcgccgagaaccttgcgcagatcgcggtgatggccggcgtgggcgcaggagtcagccgctggcgggcggccaaggcgcagcctgtgatcgaagcattgaatgaagtgaagctgcccgatggtcgaacccggctgtggagggccagcctggagcgctatgccagcccggtgacgcttgagcccacgctgagccccaatgacctgggccagtatacgaaagagggcaagacttatatccgcctgggcgcccaggcttacgagcagtcattcgacacgtcgttgcaacaatggcggatcaagcacccaaccgatccccaggcttaccagccgctccttgagcacaacggccacggtgcctggcagcacaccttggagcggccgctggagtgggaccgcctgacgctgttgcggcgaatagggcatgcaaccgaggctttcaccgaccaggcgttgctcacgttggccgatgtcagtggcgtcagcgacaacaccctgcgcaagatgcacgttgagcgtacgcccgcgcctcctgagctgctggaggcaatgcgtttgttcaacacggacaccgccgccgccgcggtgatcgaacaactggaaggcgccaaacccattgatgagttgtacctgtatgcgttgccgctgattgtggaaatgcctcgctggccacaagggcgggcgctggaaatcatcgacggcccagcactgacggctaaaccggtcaggtacggcgtggggcgttcgcgtacaggtgcgaccatcaaggtcagccgccagcatatcctgggcggcgagctacccgagcgtattctggaggccctggatgagtccgaacgtgtgcaattgcttggcgccgaggctgcgcgggttcgcgaggcgcgcaagcttgagttcaacaagcagcttgccgaccacgcgcgccaacgcaagcccgcgattttcgacagtatctatgccggtaccgaagcggtggacccgcgtgtccgccggctgcagcgcaactgcccggggctcagtgactcggcggcgcaagctgtgctcgagcacgccagtgccgacgagctggcatccttcgagaccgcaccgcgtgtgcccttgaacatgttggaggaggcccgctggtatgcccgccaagggcgcctggtacgtgcctatgccgggctgcgccgtgaggccatcgccacggcggacagtcgccggctggcgctcaatacccttgagacgttgccgggctggccgtcgacgttacgcctggaggtacgtgacggccgtatcgacggcgcattgctcgacagtatcggcccgcaggcggcgagcgcaaaaaagtacctggtcaagcaaggccccggttaccaggcgttcgatgaacgcggtgaggccctcaatagtctgcccaggaatggcgataactttttcgcttcgttgatgcatgcgctccccgatgatgcgcgccagagcttgggggtgccgcaggtaagccagcaggcggcgctgcaggcgaaaatcatcgcgcaggccgacaagcatcgtctacaagcggccgtgtggctggagcccaagacgcagtggttcaaggcgcctgcgcgggtcaatggcgtactcaaggggtattacgccagtgggcgcatgcctgacccgcgccaggcgattatccgcgaggtgcgcaagatctaccctgatttgacggacgcccaggttgatgactttatccttgagctgcggcaggcgggcaacgatgtccgggcgattgcgaatcgactcagggcgttgtttgaagaaaaccgccagatgcaggcaactctggatggctggatcagtcgcgcagcgccggccgaccgccattaccaccttttggccgcccaggccctcaagcgcagttggcgccaggctgtgctggccggcaaggtgcccggcgcgcaggtattgtcgctgaacctggatacgccgctgccgcccctgaccgcgaacttttcccatgtgcgcgagttgaacgtcagcggtgccgccttgcatgacggcaatatcgacgagtttctgcgctattttcccaagcttgaaagcctgtccatcgaagccacccagggcctgcgcgcagagcgcgtgccacgtcccttgctgaccaacttgccggtctcgctggcgcgcctggaggggctcaagcacctgaggctgacgttgaggacatctgagctggcggagcaatttcccgccaggctggcaacattgaccggccttgagcgcttggaggtcggctactttggctatcagagcgcgcgcctcgacagccttgaccttactccgctgcagcagctcaaaacgttgagagtcgttgcgcccaatgtgacgttgcaatggccagcctatgtacatcaactggcgcagatggagcgcctggacctggcacaaaccagagtgctcaagctcccagacagcctttacaccgggtatgaacggctgtggcgagggctgtcgctggactggtcgcaactgagctatgaagcgttcaaaccggcctacgaacacgtcaagaattacgcggggagctctggtccgcacctcatgaatctggatgaaatggtcaaaggtttcgcccagggagaactggcgttgctgatgggcgaaaagacggtcgccgagcgagtgaccgacgcgctcatgagcacctggaagaccccgcaaacacgcatgaatgcgctccaggcgctgcgcgaagaacacctgggtatcttcaaacagttttatcagccatcaacgcttccgggcatcaggcataagtttcgtgtagagcgctgggaggcggggtataacgcacgcatcttgacggcgcttgaaaaaagctggacctgggccgtgagtaagcgctacggggtcaagctcgacgaggagatcagcgggcagggcgatacttttgatggttcggtgttcgaactgccggcctttgacctgcccaccgctgccgaattgagcagcgagaaaattgacgagttgcccgtgttgcctgccggtactttttcccatgtgaaaaccctcaagctgagctggctggaggatgtgcccgccgaccagctcaaaggtttcgtccgtgcgtttggcggcgtagagcaactggaagtgcgttacagctacctcagcgacgtgcctgtcgccgccgacgtgctgccgtccctgacccacctgaacctgtccgataaccttatcgtggtgacccctgcggtgcaggctcaatttgatgggatgaagaatctgcaagtgttgaacctgcagtacaacccgctgggtggattgaatgtcagtgcgatgacgaagctgacggccttgaatctgcgcgatacgcggttgcaggcctggccgactggcgccgaaaaccttgcgcagttagcctgcctggatatgcgtgacaacgcgttgacgagccttgcccccagcgccctcagccacccggatatgctgttgcgcaccgaactggcgggtaacccgttgagcgctgaaggcgaggcggcattgaatagggcgcgcaaccgcatcgagcgggagagggggctgcctcagggcgccttgagccgttttgcgctggcacaagagccctggacatttccgccgacggagacggccgcgtcgttatcacggtatttactgttctggcggcagatgcctgaaaaccctgaggagactgccagtttcgtcgtgcgtttgcggcgcgtaaatgccgggctgaacgatgagcaaggggcggcaaggatcgagcagttgcgccaagccggcatgagcgacacgcaactcgatacgctgctcagtcaatggcagcggacctttgaggtgctcacgcgaaccttgaacggctgggtattcagccgagaaatccgagtcgccgatggcgacaccattgcttttacccgtacgcgagcggcagagtctatccgtttgtcctggcagcaaggcgtgacggcggggcacaccggtgaggcgggggacacactgagcctgaaggggctgaagaccggcgatctgcccgcgctcaacatggccttcgagcatgtccgcacactcgatttaaccggtgtcaggctgacggcccaaggcagtaacgagtttctaggcgctttcacgcgggcaaaccgtttgatactcagcgctaaccaactatcagtactgcccgatgcggtcgcaggcatggcgcaacttgaacggctggaactggccaccaacctgttcacgcaggcacccacgctgccaactcaggtgggcgccgagcgcctgcgctggctggacatgagccacaacgacctggagaggttcgatgccagcgcgttcagccgccttgaaacgctggacctgagctacaacagcctttcaacatggcccgagggggtattggccgcctcacacctgacccacttggacctgagtggcaatgtgttagccaacttgccgcccagcctgctcagtggcgcccatgatgcgttggtagcaggcactgacttgtcgggtaaccacactctgacgccggccgcgcgcgaggccctgtaccgttacgccgacaggcaccaattgactgaattgatggggttgccaagggcagaacttgaccgttggcaccggcgcttcgaggcaggtgccgacacggattcagacgccagttccgataccgattcgagctccgactcagacccggacggtgatgggggggctggcgtcgagcctgtggaggcgttgcccgagccgcagctcgctgttgccccggcgtcgctggagccctggctggagggttccaaccctaggcagatcgcgcagcgcacggcgctgtgggagcaactggcacaagcccctggacacgaccggtttttctggttgatgtcgagcctgcgcctgacctcggagttcaacttcaaccgcgccggtctcacgcagcgggtgtgggacgtgatcgaggtggccaccacgaatgcggagttacgcagcctgttgttcgtcgaggccgaaacccacggcacctgtatcgacgggcgtatcctcaccttcagtcagatggaggtacgtgtattcgaacaccgtgccttgcacggcatcccgttgcaaaggcccgatcttcgagggcgagcgctgctggatttatcgcggcagttgttccggctcgaccgggtcgatcaattggccgaagcgtcggccacgggcctggaccgggccgaggagcgcttgaggtatcgcataggcttgacccatggctggcccgacggtttagaactgccggggcaaccggagtacatggcgtttggtcgcccgatcgagggcacccggcgcgcgcagatccaggccagcatcatcgtccaggaagactccgatgagttcatcgagtacctggtcgcccaggatcattgggctcggtacctgcaagagcgctatcccgaacaattcgatgcgctgaacaaggagcttgcgcagaagtatgaagcgctggaggacgagcacgccgagcgtgccgatgcccagagcctgcgccgctacgaagaagcgctgaatcgcctggaagtggagcgggcgaccgcgcgtaacctgaagttgatgcaactgtcgcgcatggagatacaacgcctggccagtatccgctgagaactaatgtgggagcgggcttgctcgcgaaagcagagtgtcagtcactgataagttgactgaagcaccgcattcgcgagcaagcccgctcccacattttgaccgagttcggcctcgctctgtcagttgtcgtaacccaggttcggcgccagccagcgttcggtcacggccagatcctggcctttgcgcgcggtgtagctggccacctggtccttgtcgaccttgcccacggcaaagtactgcgcctgcgggtgggcaaagtaccagccactgaccgccgccgccgggaacatcgcgtagtgctcggtgaggaacaccccgctgcgcccggcctgcatttcgcgggcctcggggtcgagcagttggaacaactgcgccttctcggtgtggtccgggcacgccgggtagccgggggcagggcggatgccgctgtattgctccttgatcagcgcctcgttgtccagttgctcatccttggcgtagccccagtgttctttacgcacctgctggtgcagccattcggcgcaggcttcggccaggcggtcggcgagggccttgaccatgatcgagttgtaatcgtcgccagcatcctggtacgccttggcgacttcctcggcaccgatgccggcggtggtgataaagccaccgatgtagtcggttacgccgctgtctttgggcgcaacgaagtcagccagggagaagttcggcttgccgtcggtcttgatgatctgctggcgcaggtgatgcaaccgggcaatcggctggccgtcgtcgccgtagacttcgaggtcatcgtcctgcacctggttggtcggccagaagccgaacacggcgcgggcgctgatgagtttttcgtcgatcagcttcttgagcatggcccgggcgtcggcgtacagcgcggtggcggcttcacccaccacttcatcggtaaggatgcgcgggaatttgccggcaaggtcccaggagataaagaacggtgtccagtcgatgtactcggccaacacgttgaggtcgatattgtccagcaccttggcgccggtaaaggtcggcaccactggcgtgtagtcgctccagtcaaactgcggcttcttggcgatggcggcggcgtagctcaagcgctcggtacgtgcgctgcggttggaggtgcgctcacgcacgtcgatgtattccaggcgggttttctcgacgaaaccggccttcagctccttggacagcaactgcgtggccacgcccacggcgcgggaggcgtcggtgacgtagatcaccgcgtcattgctgtacttgggctcgatcttcaccgccgtgtgcgccttggaggtggtggcgccaccgatcatcaagggcaggtggaaatcctggcgctgcatctcgcgggccacgtgcaccatttcatccagggacggcgtgatcaggccggacaggccaatgatgtcgcacttctgctccttggccacttgcaggattttttccgccggcaccattacgcccaggtcgacgatgtcatagccgttgcaaccgagtaccacgccaacgatgttcttgccgatgtcatgcacgtcgcccttgaccgtggccatcaggatcttgcccttggcttcgggcttgtcgcctttttccagctcgatgaacgggatcaagtgcgccaccgcctgcttcatcacgcgggcggattttaccacctggggcaggaacatcttaccggcgccaaacaggtcgccgacgatgttcatgcccgacatcagcgggccttcgatcacttcgatcgggcgcgcaaacgacaggcgcgattcctcggtgtcttcaacgatgtgcgtggtgatgcccttgaccagtgcgtgttccaggcgcttgttgacgtcccagccacgccattcctcggtctcggcttccttgacgctgccgtcgcccttgtacttgtcggcaatcgccagcaaggcgtcggtgccgtccggcgtgcggttgagcaccacgtcttccacggcgtcacgcagctcgacggggatctggtcgtagatctccaactggccggcgttgacgatgcccatggtcaggcccgcgcggatcgcatgcagcaggaacaccgagtggatcgcctcgcgcaccgggttgttgccacggaacgagaacgacacgttggacacgccaccggaggtcagcgcgtagggcagttcgtcacggatataggcacaggcgttgatgaagtcgacggcgtagttgttgtgctcttcgataccggtggcgaccgcgaagatgttcgggtcgaagatgatgtcttccggcgggaagccgacttcatcgaccaggatgtcgtaggagcgtttgcagatttccttcttgcgcgcttcggtgtcggcctggccggcttcgtcgaaagccatcaccaccaccgccgcgccgtagcgcttgcacagcttggcgtgatgaatgaactgctccacgccttccttcatgctgatggagttgacgatgcccttgccctggatgcatttgaggccggcttcgatcacttcccacttggaggagtcgatcatgatcggcacgcgggagatgtctggctcgccggcgatcagattaaggaaggtcaccatggccttcttcgaatccagcatgccctcgtccatgttgatgtcgatcacctgagcgccggcttccacctgctgcagggcgacttccaaggcttcggtgtagttgtcttcacggatcagccttgcgaacttggccgagccggtaatgttggtgcgctcgccgacgttgacgaacaacgagctgcggtcgatggtgaacggctccaggcccgacaggcggcaggccttgggaatctccgggatcgggcgtggcgcataaccggccacggccttggcgatggcttcgatatgccctggcgtggtgccgcagcaaccgccgacgatgttcaggaagccgctttgggcgaactcttcaatgactttggcggtttgcgacggcagttcgtcgtactcgccgaactcgttgggcaggcccgcgttggggtgcgccgacacatgggtgttggccttgttcgacaactcttccaggtaggggcgcagctcgctggcacccagggcgcagttcaagccgaccgagatcggcttggcgtgggccacggagttccagaacgcttcggtggtctggcccgacagggtacggccggaggcgtcggtgatggtgccggaaatcatgatcggcagttcgatacccagggtttcgaacacgccttgcacggcgaagatcgcggccttggcgttgagggtgtcgaagatggtttcgatcaggatcaggtcggcgccgccttcgatcaggccctgggtggcctcggtgtagttttccaccagttcatcgaaggtgacgttgcggtagccagggttgttcacgtctggcgacagcgaacaggtgcggctggtggggcccagcacgccggccacgaagcgcggcttggccgggttttcgtgggttttggcgtcggcgattttacgtgccaggcgcgcgccttccacgttcagttcatacgccagctcttccatgccgtagtcggccatggagatgcgcgtggcgttgaaggtgttggtttccagaatgtcggcgccagcgtccaggtacgccttctcgatgccgccaatcacgtcgggacgggtgagcaccagcaagtcgttgttgcccttgacgtcgctcggccaatcggcgaagcgtttgccacggtagtcctgctcctcgagcttatagctctggatcatcgtgcccatgccaccgtccaagatcaggatacgttccttgagggcgtggtgaagggcttgcagacgaacgcttcggtcggacatgggactactctggtcaggcatttcggagggcgtgaatcataacaaacctgcgggcttttggagcatgtagagcttttgcatgaatatcgctcatgttgctggggtgcatggcccggtagaatcacgccacttcaaacaccgcacgccttgaatcgggaccggatacatgtcacttcgtttaatcgtcagcgccgccctggccttgatagccagcagcgctcaggcggcaggtcccgcttcggcgatttcctacacccgcgacatccaacccatctttactgaaaaatgcgtggcctgccatgcctgctatgactccgcctgccagctcaacctgggcagtgccgaaggcgcagcgcggggtgcaagcaaaatgccggtgtatgacggcgagcgcagccaggccacgcccaccacccgcttgttttatgacgcattcggtaaacaggcgtggcagcagaagggcttctattcggtgctggacgcccagggcagccaggctgcgctgatggcgcgcatgctggagctggggcacaacgcgccgctggcgcccaatgccaagctgcccgacaacattgtgctggggctcaaccgcgaaaacatgtgcgcgacgcccggcgagttcaatgcctatgccggcgctcaccccaaggaaggcatgccgctggcggttaccggcctgaccgaccagcaataccagacgttgcaacgctggctggcctccggtgcgccaattgatgagcaaggcttggcacccagcgccaaggaagccctgcaagtgcagcagtgggaaaacctgttcaaccagcccggcgcccgggaaagcctggtggcccgctggctgttcgaacatttgtttctggcgcatatctatttcgagaatggcgagccggggcattactttcagtgggtgcgttcgcgtacgcccagtggccagccgattgacctgatcgccacccgtcgccccaacgacgacccaggcacccaggtgtactaccgcctgtggccggtgcagggtgtgatcgtgcataaaacccacatcacttaccccttcagcgcggcgaagatggcgcggatcaaggcgctgttctacgccggcgattggcaggtcacggccttgccaggctacggccctggcagccgtgccaacccgttcgcgacattcgaagcgatcccggccaaagcgcgctaccagttcatgctcgataacgccgaatacttcgtgcgtactttcattcgcgggccggtgtgccgtgggcagatcgccacggacgtgatccgcgataacttctggacgctgttccaggaccccgaccacgatctgtacatcaccgatgcacgttatcgcggccaggccacgccgttgctggccatgcccgggcagaatgacgatgtgggcagcgtgctcagcctgtggctggcctatcgcgacaagcgcaaccagtacgaagccttgcgccgtgacaactatgcagacctgccggcgccgagctggtcgacgttgtgggcgggcaatgacaacgccttgttgagcattttccgccatttcgacagcgcctcggtgaccaagggcctgattggcgaagtcccgcagacgatgtggctgttcgactacccactgctggaacgcacctattaccagttggcggtgaatttcgatgtgtttggcaacgtctcgcaccaggcccagacccggctgtatttcgacctgatccgcaacggcgccgagcagaacttcctgcgcttgatgccagcggatacccgcgaagacttcatggacgactggtaccagaacagcggcaagctcaagttgtggctggactacgaggcgattgacgatgacaaggccagtgggttgcacctgagcgagaaggaccccaagcgtgacttcgccgaccagttgctgacccgctacggccatttgaacgccagccccgacccgatcaaccgctgcagcggcgcgttctgctcccgcgacggcattgacccggccttgcaggatgccgagcaagccctgagccgcctgacctcgcggccggcggcggggctcaaggtgatcgagcaattgcccgaagccaccatgctgcgcatcgaaaccgccagcggcaagcgcgaggtctacagcctgctgcgcaaccgtgcccacagtaacgtggcgttcctgctgggagaggcgtatcgctatcagccggggctggacacggtgacgatctacccaggcgtgctcagcagctacccgaacttcatgttcaatattcccgcccggcaagtgcctgagtttgtcgcgcagatggagcaggccaaggacgccaagagcttcgagaaaatcgtcgaccgctggggtgtgcgccgcagtcacccgctgttctggcagtacttccacgacttgtcgcaatacatccacgaaaccacgccggtggaagagggcgtattggacatgaaccgctatgagaacctataactacagctattgatccggtcatttctccacgcgggggctgaagcagtcggatatctacctacggactggaaaggggatgccgatgttgatttcagtgcagttgctgcgcgcgttggcggcatggctggtggtggggcaccacgtcatgcagctgtttttcaactttgaggcccacaacgcgctggaggacctgttagtggaaaaaggcggcgctggcgtggatgtgttcttcgtcatcagcggcttggtgattttcctcgcaagtgccgataaagcgctgacaccttggcgctttatgctcatgcgcctggccaggattgctccggcttattggttctatacgttgctgttggccttgctggtgatggccatgccctcgatgtttccagacgttcagctcgaactgagccatgtacttttgtcgatgctctttatccccgcgcagaacccggcgggctatggcgtctatccactgctggatgtcggctggacgctgaatttcgagatgctgttctactgtctgtttgctgttgcgctgctggtgcgtgaagcctatcggctatgggtagtggccgtgttgttgtacctggtgtgttatgtcattggccccttctttgacttggccgacgggttttaccgcaatgacattgtgctggagttcctcatgggcgtggtgatcggcatgctgtaccgccgtggcctgtgtcgggccaggccgtggctggcgttgctgggtatcgtggcggcgctggcggcgatttatcagggcgcggatgtcccccgcgcattggagtggggcgtgcccagcgccgtgctggtgatcagttgtgtggcgctggagccgtacttccacggctcgcgctttataaaaatgctgggggactgctcctactcggtatacctgcttcatgtactggtgttgtgcgctggacgctgggccatcgagcatcgtggggtaggcccctacaccatggtgcctgtctgcatcgtcgtcatcgcgctcggtgcatttttcagctaccacgtgttggagaagggcacgcatcgccggatcaagcattggttcggcctagatgagtcgatgcccttttccaggcaaaggcactaggactgccgcctggggtggggttcaaggccttatgtacttccagtaggccttgccgtagtccatcagcaactcggtcccggcagggatatctcgccaagcgattaaaaacaccatgtagttgcctacatacagggcgccgacattttcgatgcccacgtcgggcaggttcggcaccttgaccgcattgatcaggctcagcgtattgctgttgccgtggccgctgatggtcgcgccttgagtgtgggtctggaatagatacgtaccgacagccgcctcgcctttttccaggatctcggtattgatcgaggcttgatccagatgcagtttgcccgtgtacggcccaagcacgtcgaaacgcttaatatcggttctggccaccaccgacaggccgcgctccgggccatccgccagtttcctgacctccaccaggcgatcaagccgacgatgatggctgccctccttggaaatccattcacgaatacttttggtcgcggcttccttgacttcaacatgttgcaggccggtgaactcgtcaaaaaaacggttggcgtcggtaatctcgatgctgtgcagcgggccttcaagctcaagggtcaaactgcgcctgatgtctgtcgggtcctgcaggatcggtgcgttattgttgattttatgatcaaaggacgccgtgatcgagctggagcggcgccgggtgggtaccgcgtcctcttccaggcgtgggcgttttgagctgccgggcgtgggcggcgcggggcgtttcctggctaccggctggtcctgggggcttctttgtccgaatagccacctgtctttgccggcacgggtcatgctgccattgtcgttgacgtagctgctccagatgacggggttgaggttgttctgttcgacaaacgcgcgcatggatacctttgagttggcggcgttgtagtgcttgttccacgcatccaggtgctcgggtttgaggtcgtcgaattcctcgccgcgcgcatatttggcgagcactttgcctggcgctcggtagctgccatccaggtttacgtactcggcgaaggccaccgggtccagattatgatcggcggcaaatccttcgagggtgagactgttgcgctcgcgttgggatgccttgctccagcgctccagatgatcgtaggtgacgctggtacgggcggttcccgcacggtcgagcatctgttgccctctgcgcgtcagggtgttgcgggtgctgacaaactgccgaaaggcgttggggtccaggttgtaagtattgacgaaggtgtccatggtttttttcagggcgtcttcgctggcctcggtccatttcaacagcaccgatggcgttaccatgctgggtgcatccggcgcgccgcctgtcagtttgatctggcctgagtaccaatgtccgggctctaccgaggacagcgtgatcgacaagtcccggttggttttgggattgaccaggacaatggaaaagctgttgtcggcgccagcggcggcttcctggataaagccataggagttgtcgcggatctggtacaccgcgatcttgcctttatcatcaatattgcagatatatttctggttgtagtccactcgggagaagatcccgcgtgcgtcgggcttaaggccacggatcaactcggggtcgaccgcgtatcgacggatcagcgggctgctattgctgatcaccgtgatcggctctcgctagcgcggcccgaaggctttattggaggccgtatctatcaagcgatagtcgggggcgtcgaggctgccgacgttgcgcatcgggatgttggcgaagccgtcgacggtaaacagtttgtcccccgtctgcagtggcttccaggtgccagggtcgaccgagcgcatgtgccgggcggcgatggtcccatcccgtagttgggcaataccgcgttgtgcctggcgcatcaagccgcggcccagcttgagcaggccgaaacgtgccagtctgagcaggctgggcagggcggccaaggggttgagttcctgcagggtggcaatcaccagctttcccgtgagcttcgccagttttggcagcgccaggcgcagcccggttttaccggcctgaatagccaggcgggcagagccggacacatatcggccgaccggcaaggcgaaaagcacgatgtcgatgaacaggctggcgacgccggacttgatgcgctgggggtcgccggagccgatgtcgtcgataccgccccagaacggcagaaaaatcttgccccagaaggcgaggtcttcgagcacttcagcgccgatgtccacctcccgcgtggctttacgggttttttccagcagggctgcttcgtcacagaaaaacagctcgcgggcgatcatgctcgccagcctttcactgcgtggcgcatacagtgtgttgggctgcaacgatgacgcgcgcgccaaggcggttttgataccaggcaaggtctcgccgacttgctcaacgatcaactcagcctttttgcctggcgtgggcgctttgttctcgcggtaggcttgccggtcaaagggcacttcggtggccaatctgtatttacaccagctcattgcgtctcgtagctctaccactttgccgttcagtggcagagtcttgatgtctttacggtgacggatcacgccggcgaaggggaacacttcgatgtaggtggcatgaaagggcgagcggggcttgacgatgcgcaggatgaaacctgcccggtaacgcacggcatcggtcttgcgctgggtttcatactcgataggcaccttgtccagcgcttctctcaaggagtacacggtgatctcgtcctgattcacatccagggtcgcactgccaaggtgcgcaagcaatgacttgatcagggttttataggcgtttttcggctgttcgagggcctcgcggaaggtcttgtcgtattccgagtccgacgcatagcgccagcgcccgggcaggtcgagcgcaaggccctgaatcgcgttgaacatttcgtattcatgctgctccagtgcggtgacagcttgagtcagctcatcgcgggtagggcctgacgttcggctggcgatcaagccattggcctgcgcccattggaccgtggggccgagcctcgcggcggcgaccaaggcctgctgttcaacgttatcgccactggcgcgaaaatgttccgccgccaggttgagcaactgctcgaagctcatctggcgcgatgagccgggtgcaagcgcttcggccagcaggaaaccgcttctgaaattgacccaggtactgctggcggcgtacggcaggtcatcggggatatcagccacccacacttcgctggccacattggccttgacgacgcacaccgccaattgcgccgcggcagggctgatcgacaagctgtgttcataacggctgatcaaggagtggcggatcgacgagtaagacgccccaggctcgataaataacttcaattcgttatccatcggcgactcggtgttgggcatgatcgtgagccacagcgctcgccacagcaatttcacccgcaccggttgggggcagatttcgtccttctggctgccataccagtccagtgccttggcgattcgttcgcccagcgccaggttgtcggggctattgagaagctgttcaagcaggacggttggcgtggtggtgagcatggcctgctgtgaggcggtgaacgtttcgggcaatacctggcggaacagcgattgtcgggtgtgtgtttcgatctcgcggataacctccttgatcttctggtcggcaggggcatccagcacatgctgcaaatcgctgggctgcccatcgtggcccagttttctcagggtgtggtgttcctgcaaaccctggagaaccgctttccattgttcggggggcttgggttgcgccgggaggatcgagtagtacttgagcaccaggtcaaaccgtaccgaaccgtcgcttttgacgccgtttcccacacgccggttgatatccagcaacacgtcggcgtcgatgtaccaataggtgggtatatggcgcaggatcaccgaatggtcggcaatgctgaacgtttcgggagggtcgggtatcggcgagcgggcgctgctgagcagggttgagagcaggtcataaagaaagtcccggcccagaatggagtcatcccgttcaggtttttcccgtaggaactgctggaagtcttcatcggcctccagttttgcaaggacccgaacggcttctttgcactcgcgattcagctcggagttcaacgggggaaagtaataaagctcggtggaggatactgccagtgagctttgttccgttacaaagtcaatcagatgatccagatgcgcttgctgttcaggcaagcctttgaaatagaaacgctgcagcgcattattcattcgatcctcacaatccatagtggaagaggattcactctattgagccgggttttgcggcgggggctatataggtaggcacaggtttttgcacaaatgggccggtgcagcgggggccttcggtcagcaggatcaggtctttcctgacaaaaatactcggactttgtacctgcgtaataatttggcgtaaactgcgggcaagcctgtgaggagtttccatgactgccataaccattaccgacgccgcccacgattacctggctgacctgctgtccaagcagaacaccccgggtatcggtatccgcgtctttatcacccagcccggcacccagtacgccgagacgtgcattgcctactgcaagcctggcgaagagaaacctgaagacaccgccctggggctcaaaagcttcaccgcctacattgacgccttcagtgaagccttcctggacgacgccgtggtcgattatgcaaccgaccgcatgggcggtcagttgaccatcaaggcccccaacgccaaggtgccgaacgtcaatgccgacagcccggtgaatgagcgcatcaactactacctgcaaaccgagatcaaccctgggctggccagccatggcggccaggtgagcctgatcgacgtggtggatgacggtatcgccgtgttgaagttcggcggcggctgccagggctgtggccaggcggacgtgaccttgcgtgagggcatcgagcgcacgctgctggaacgtattcctgagctcaagggcgtacgagatgtgactgaccacacgcagaaagaaaacgcctactattgagtaaggtgttcactgcgaacataaaaaacggcgccccgtgagcgccgtttttttatgccttttctgtaggagcgagcttgctcgcgaaaaacatcaacgatgacgcgtgcttgctgaatgaacgcggcgcctgttagtttttcgcgagcaagcccgcttctacaaaaagccttgaggcaagccaggtccacataggtgtttgcatttcttcaggggcggtagaggtgcgcatgccctgcgcggtacagcgacgactcactgaaactgtcactggccaacacccggcccaccacaatcaatgccgtacgccgaaaccccttggccgcgactttctgggcaatgtcactcagcgtaccgaccacccaatcctgatccggccaggtggcccggtgtactacggcaatcgggcaatccgcgccgtagtgtggcagcagttcggcgacgatcttgtccaggtgattgacccccagatgaatcgccatggtggtgccatgccgcgccaggctgtcgaagtcttcaccggggggcatgctggttttatcggcgtaacgggtcaggatcacgctttgggcgatgtccggaagggtcagttcggtttcaagcaaggccgcgcacgccgcgaccgccgtgacccctggaatgatctggaacgggatgccccgctcgcgcaaatggcggatttgttcgccaatcgccccatacaggcttgggtcgccggagtgcacccgcgcgacatcctggccttgggcatgggccgtcttgatcagctcgatgatctgctccaggtgcagttcggcgctgttgaccacctggagcgcctgatgaccttccagtacggcggcgggcaccagcgagccggcgtagatgatcactgggcaactgcggatcagccgctggcccttgacggtgatcaattccgggtcgccggggccggcgccgataaagtagacggtcatggagaagtcctgttgaaaaacgggcgagcatgaagattgctcatgatcgaaagcggcaattatcgggattttaacctgcgcaggccaatgcaagggtggcctgtgcgcttttctggcgggtgatcagcaggcgcgcggggccattggacaggtgctcggccagggccagggcggcgctttcggctacgccgtaacagccagtgtgggcaaaggccagcgctgagcgatggctcagccgatgctcatagcccaccagttgttcggcactcaagcactgcaagggcaggttcaagcgctgggccagcgccagcagcccaggctcatcgcgtttacggtcaatgcttgccaatgcggtcacgcgtgagcgctcaatgccggcctcggccagggcgctgtccagcaatgccagcaggctgtgaacctcacagccgcgctggcagccaagcccgacaaccagaatcatgccgagtagtggtcgtcgcggttgcggcgaaacaaccaggcgctgatcaggcccagggccagccagaaggccacgttggtcaattgcgaggcgatcttgaactgcgcttcgagcgcctcgggggccaacatcgagtgcacttgcggctgcggcgcgccgatgacgtggggaacggcaagaatcgccagcccaagcgctttcaacagccagttgcgaccgaacacgatcagcgccaggccggcggcggtggacgctgcggtgccgatccaccaggtctggcgtaacgtcaggtcagccgccgcggtgccaggcagctccgggggcaggcccagggtgggcgccagtacaaaggtcgcgtagccggccaggccccagagcaggccttgggcggtgcgggttggcgcgcgcagcgtgtagaggccggcgagcataagcgcgaatcccaccgccactaccaggttgccgccggtggtggacagcactcgctgccagccatcttcaggctcccaggcttgggcgtcgtgggtgtgagctgcggcgccagcggcgtgctcatgcaccacttcggcggttggcggggttttttcaaagctttccgcctgcagaatcagcggtgccacccaaaagctttgcagcagggtcagcagcaaggcagccagaagtccggtgaaccctgcggtttgcgcaatacgcttgatcatgtcggcagctctcaatggcacgggaacgcggcgctgtggcgggtatcgtgggcggcgttgtgcaccgcctcgatatgcgagaacccggcgaaatacaccaggcaagcgccaaggatcgatgcaccgatggcggcggtcaggcgttggctgagggtggcggtgctagtggcggtgtgcgaagtgctgctgatgatcgacatggcgcgtccctttcaggtgtcagggtgaaacgagcgcatgaaaaccccacgcgccaggcacgcagggttcgaacagcgcccgcccaccgcgggtttgttatctgaatttttcgggccggtctccgggcttgcgaggggcggctcatcaaagagtcctcctgaaagcatcgccttcccatgcaaaagcacagtggccatgacgcttcgctcgcttaccgttgcgggggcagcaccggacttgtcattggatttgacgcaccggtttcccgtttcaccctgtgaagggcacccgaaacaaggtgtgtaggagagcatggtgtgcaggtcagcgtcaattggatgagggcacctacgaagtacacggcgatgaagtatttgcagacgcaataggcagacacgcgatgtatgaagtgtttgggaacgcctgcgcttttttcgataactcagaaggaaacccggtttatctccccgcgcaacattgaaattaacggtgggctttatgcgactttccaatacgctgcaaagttttcatgcgccgcttgctggcgatcagcaatcagcggtggccgatgcgaccctaaggcccaacgacccctctgaatcgaacgttgataaaccctctttcacggttgatcaggccgcgcgtcaaatcactcgaaccggccatcgttggtttgacgccaatcgcgacggcatcacgcagatctcctattcattcaacaagcacgcaagagggcacacggcgttcaatgcgacccagaaagagcaggcccggcgctcgatgcaatcgtgggaggatgtcgcgaatgtttcattccaggaaggcagtcgtcgccccgaggggcttctggcgttttccaacagcacggactacgaggtcgccttcggccagtatccgggccaggaaggtaaagtgctgatcaatccccgattcggcaccaatactaacccggccctgcacaatcatgggcgaatgaccctgacccatgaaattgggcacaacctgggcctgttacacccaggcacctataattttggtaatcccaattaccgcgatcacgccttatatgctcaggatacgcgggcttacagcgtgatgagctacttcgatgcacctgaagcgggtaaacacttcaatggaaagttaccgtcggcgccgatgatggatgatatcgccgctgcgcagcgggtttatggtgccaataacacgacgcgcaattcagataccacctatggcttcaactccaatgcgggacgagactatctggagttgaactcgcgtcacgatacggccttgttttgtgtatgggacggtggtggtgtcgatacgttggacttttccaagtatcaccaaaaccagactatcaatttgcgggcggagtccttttcggatgttggcggcctggtggggaatgtttccattgccaagggggttacgctggagaatgcaatcggcggctccgggcatgactcgatcattggtaaccaagcaaacaacgtgcttaaaggtggggcgggtgcggatcgactccgaggtgcggggggcgctgacaccttcgcttacgacaatgccagcgactccacgccggaatatcccgatcagattatggattttgtcacgggtgtggacagaatcgatctgtcgaacctgctgggcaacgcgggggttgatgccctgaggttcgtcaggcggctgacgggcaaaccaggtgaagcgattctggattacaaccgtacgactaacctgtctaggctggccatcgacctcacagggaatggccgatttgattttttcctcaaggcttacggcccgatcaatgtgcccgacatcatcaccgccaatcctggcaggcagcgctacgcctagttggccgctgcctggaccgacttgccggtaggtgcttgagcattgaccgcctgccgtgcactgcgtagccttgcaccctcgaggttcttcggcccaggccgaagctaagaagggaacgcggttcaagccgcggctgcccccgcaactgtgaagggttcagttgactgccacgccactgccgatagggcgggaaggcgcagtcagcgttggtcgcaagacctgcacaccccaagccaggagacctgcctcgccactgattttccaattcaaccgggcggggtgatccggtgacgaaatccgctgctgcgcgccgccgcagggcctgtcgtcccgtatgcccgccccaaagggcatccgatgaaaacactggccaaacttcccgtcaccatcgttaccggcttccttggctcgggcaaaaccacgttgctgcgccatatgctcgacaacgcccagggccgtcgcattgcggtgatcgtcaacgagttcggcgagctgggcatcgacggtgaaatcctcaagcagtgttctatcggttgcaccgaagaagaagccaatggccgcgtctacgagctggccaacggttgcctgtgctgcaccgtgcaggaagagttcttcccggtgatgcgcgaactggtcgcccgtcgcggtgacctggaccatatcctcatcgaaacctcgggcctggccctgcccaagccgttggtgcaagccttccagtggccggaaatccgcagcgcttgcacggtggacgcggtgatcaccgtggtcgacagcccagccgtggccgccggcacctttgccgccttcccggaccaggtcgacgcccagcgcaaacttgacccgaacctggaccacgaatcgccgttgcacgagctgttcgccgaccaactggccagcgccgacctggtgatcctcaacaaaagcgacctgatcagcgccgaagacctggcccgtgtgcgcctggaagtcgccgaagaactgccgcccgcggtgaagattatcgaagccagcagcggtcgcctgcccctggacgtgctgatcggcctgggcgccggttccgaggagcatatcgacgggcgccatagccatcacgaccatcaccacgaaggtgaagatgaccacgaccacgatgccttcgactccatctccatcgacttaccccaagccgatgaagcgctgctgctcgacgccctgacccaattggtggtgcagcacggcatcctgcgtgtgaaaggtttcgccgcgatccccaacaaaccgatgcgcctgctgatccagggcgtgggcacgcgctttgacaagcacttcgaccgcgcctggggtgctgacgaagcacgcactacgcgcctggtgctgatcggccaggaactggacgccgtgggccttgaagcgcaattgcgcgccgccctcagcgtttaaccatgcacctgctcaggacccaacccggtggtttcgtcgcggacgacaatattgccgaccttggccaaacccctgctgagctggtgatcctgtgcagcggtgattccagcctggcgctgctcgccgaagccgcccagcaattgccggaggattaccccagcctgcgcctggccaacccgatgcaggtgcagaaccatgcctcggtcgacctgtacgtcgacgaggtattgcgccacgccaaggtcatcctgctgtcattgcacggcggcatcggctattggcgctacggtatcgagcgcctggtggagttggccgaacgcggcgtcaccctgatcctggtgccgggtgacgaccgcccagacccggaactcagcggcctgagcaccgttgcggccgaacaccgcgagcgcctgtggcacttcctgcgccaaggtggcctgggcaatgccctggatttttatcactgcctggccagtgcccacctgggccgcgactatgcctgggccgagccgcaaaccctgccgcgcacggcgatctatcacccgcgcaacgccaatgcccgcctcaatgactggcaggccgattggcacgctgattggcccgtggctgcggtgctgttctaccgctcgcatttgcaggcggccaataccggctttattgatgtgttctgtcagcgcttgcaagcggcgggcctcaacccgttgccgattgcggtggccagtctgaaagagcccggctgcctcacggtggttgaggacctgctggacgatgtgcaagcctcggtgatcctgaacaccaccggctttgcccagtccagcccggaagcgccgcacctgcgcccgtttcgccgcaatatcccggtaatccaggcgatctgcgcccaggacaaccaacccggctggcaggccagcgaacaaggcctggggccccgtgacctggcgatgcatatcgctttgccggagctggacgggcgcatcatcagccggcccatcagtttcaaggacctggcctggcgcagcgagcgcagccagtcggatgtggtgtgctaccgcgcagcgcccgagcgcatggattttgtcgctgagctggcacgccgttgggtcgagttggcgtgggtgcccaatgcccagaaacggattgcgctgatcctcgccaactacccgacccgcgacggtcgcatcggtaacggcgtgggcctggacaccccggcggcagccctgaatatcctgcgcgccttgcaagccgaaggctacccggtggcggatgtgttgcccgacagtggcaccgcgctgatccaggaactgctcggcggcgtcaccaacgacctcgacagcctcgacctgcggccctgccatcaaagcctgggccttgtggaataccaggcgatgtttgatcgtttgccagcgtccaatcgccaggccgtactggcgcgttggggcgcgccgcaaaacgatccgatgtgccgcgatggccgcatgatgatcgccggcctgcgcctgggcctgaccttcgtcggcatccagccggcgcggggttaccaggtggatgccagcgccgtgtaccacgacccggacctagtgccgccccatggctacctggcgttctatttctggctacgccatacctacggcgcccacggcgtgatccatgtgggcaagcacggcaacctggagtggctgcccggcaaaggcgtgggcctgtcggagcactgctggccggatgcactgctggggccgctgccgaatatctacccgtttatcgtcaacgacccgggtgagggcgcccaggccaagcggcgcacccaggcggtgatcatcgaccacctgatgccgccgctgacccgcgccgaaacctacggcccgctgcgtgaccttgagttattggccgacgaatattacgaggcgcaattgctcgacccgcgccgtgcgctggagctgcaaaaagacatcctcaagctggtgcgcgaaacccgtatcgaccaggagcttgaactgggcagtgaggcggacgcggcggtgtggctgccgcgcctggatacctacctgtgcgacttgaaggaatcgcagatccgcgatggcctgcatatctttggcgagtcgcccgagggccgtttgcgtatcgacaccttgctggcgctgttgcgcattccccgtggcgatggccggggcccgcagtcgagtctgctgcgcgtgttggccaaggcattcgacctggggtttgatccgctcgattgtgcactggccgagccctggacggggcggcgcccgttggtgttgcagaagattgacgatcagctgtggcgtacggccggggatacccgcgaacgtctggagttgtacgcggcgcgcttgatcgagcaggcgttggaaggccccatcgaacagttggaagagcccggctggcaggaggtgaagtcggtgatcgaaagcctgcgcattgtcgtcgcgccacgcctggatgcctgtgggccggcggagatgcgcggcttgctcgatgccttgagtgggcgctttgtcccggcagggcccagcggtgcgccgagtcgcggtcggctggatgtgctgcccacggggcgtaacttctttaccgtggacgtacgcaacctgccaaccaccacggcgtggcgtctcggtttccagtcggccaacctgattcttgagcggcacctgcaagaccacggcgaccacctgcgtcagctcggcctgtcggtgtggggcactgccaccatgcgcaccggcggtgacgatatcgcccaggccatggcactgatgggcgtgcgcccggtatgggcaactggcagtcagcgggtggacgatttcgagatcctgccgatcagcttattggaccgtccgcgggtggacgtgaccctgcgagtatccgggttcttccgcgatgcgtttgccaacctgatccgcctgttcgatgcggcggtgcaggcggtggccgccctggatgaacccgacgacatgaacccgctggccgccaaagtacgcagtgaacgccaagcattgcttgaggcgggcctggatgaaggtgccgcggccaagcaggccggctggcgcattttcggcgccaaaccgggtgcctatggcgcgggcgtgcagggcgcgattgacgggcgcttgtggcagagccgcgaggacttggccgaggtctacctgaactggggtggttatgcctacggtggcgctgacgaaggcactgcggcccgcgagcaatttgcccagcggttgagccaggtgcaggcggtgttgcagaaccaggacaatcgcgagcacgacttgctcgactccaacgactactaccaattccagggcggtatgctggccgccgtggaaaccctgagcggcgaaaaggccgccagctaccatggtgaccacagccagccggacgtgccgaaaatccgcaccttgaaggaagagctcaaccgggtgatccgttcccgtgcggccaaccccaagtggatcgaaggcgtgaagcgccatggctataaaggcgcgtttgaaatggccgcgaccgtggacaacctgttcgccttcgacgccaccaccgcgctgattgacgatcatcaatatgccttgctcgccgatgcctacctgctggaccccgacacccgtgccttcgtgcaacagcacaaccccgatgccctgcgcgacatgaccgagcgcatgctcgaagcccagcaacgtggcttgtggcaggctccgggggcgtaccgcgaagccttggaaaacctgttgctggacatagaagaagacagctgagtgatcgttcccacgctccgcgtgggaatgcagcccgtgacgctctgcgtcacaagaacggacgccgagcgtccagcgaagcgttcccacgcgggagcgttggaacgagctattaagagttgactatgactgatactccccatttcccgctgtccgccgtggtcggcgccgatgacttgaagctcgcgctgtgcctggccgccatcgacccgaagatcggcggcgtgctgatcgaagggccacggggcatggccaagtccaccctggcccgtggactggcggacctgctggccagcgggcagtttgtgaccttgcccctgggcgcgacagaagagcgcctggtcggcaccctggatctggatgccgcgctgggcgaaggtcgcgcgcaattctctcccggcgtgttggccaaggccgacggcggcgtgttgtacgtggatgaagtcaacctgctggccgaccacttggtggacctgctgctggacgtagccgccagcggcaccaacctgatcgaacgcgacgggatttcccatcgccatgcggcgcgctttgtactgatcggcaccatgaacccggaggagggcgagttgcgcccgcagttgctcgaccgcttcggcttcaacgtggcgttgagcgggcagaccttgcccgccgagcgcgggcagatcatccggcgtcgcctggatttcgacactgacccagctgcgttctgcgcgcagtgggcgccagcccaagccgccttgcgcgaacgttgcacccaggcgcgggcacggctcgacagcatcgccctggatgaccaggcgttggcgcgcatcaccgagcgctgctttgccgctggggtcgacggcttgcgtgccgacctggtctggttgcgtggcgcccgtgcccatgcggcgtggcgtggtgcggccgctatcgagcaggaagatatcgatgcggtggcagaatttgccttgcgccatcgtcgtcagcaacagactccgccaggctcgccgccccagccgaatgacgggccgtcgtcgtcaccctctgacacctcgcccggccaaggccagtggggcgatatgcccgcacccgccttgcccacgggcgtacgccgcgatgtacccacctggccaaaaaagccctaggcatccgcccccgtcctgacgcgggggcggatgcccggccccaggtggggcgattgaacaccggccggcagggcaaggcccgcagcgcccagcgcggggcgatcaattggccgggcacgttgctcggcggtcggccgcaatgtcgtgcggacctgctgttccatttgcgttgccggtcagcccctgagctgtggctggtgattgtcgatgcctcggcgtccacgcgccgccatcgggcgttgaccgacgccaaggggctgctggcccagctgtttgacgatgcttatcggcaacgggcgcgcatggcgttgttgacggccagcgggcaatcgccgaagtggcaggtgcaaggtttgaaggcggcgaaaggcttggccgattggttggcgcagttgggcgcgggcggcgggacgccattgctggctgcgctgaccgaagcggggcattggttggcggcacggcgcaagcgctatcccgccgagcagcagaagttgctggtagtgaccgatgggcggctcaaggcgatgggcgcgctgccgcgattggagtgcccaggcatgttgattgatatcgagcgcgggccgatcaggttggggcgggctgaggaattggcggtggggttgcagttgggttatcagcatatcgataagctgtagcgtctgggctatcgctttcgcaggcaagccagctcccacattttgacctcgccgcctatcccatgtgggagctggcttgcctgcgatgaggccctcaaacacaccacaccagtatcagcctgtccccggcacattcggccaaagatcggccaccagaaacaaccgctcggcttcctcccactcctcaccgttcggcaccatgcgcaccagcaactgcgccggcgccattgggtccagctctgccagccagtcttgcatctgcacctcactccacacttcatcagccgggtaatgcgcgggcgccagccaggcatggcggggcaggggttgccagcgacccgccgggcgagtgctgacaaagtctgtccagtcgcgctgatgcaaccagcgcccacgcaggtgctgcgggtgagcgccgaggggggattgcgccgcgccgggccaggggtagagcagatagccgccgagccacaaatgcgcatcgaacgcttggatatccagcgccgccaaggcttcgcggctctctgcccgcgcggagatcggcagttgatgctgggccaggtgcgccagcttgcggtccaaccggtcatgacagccaggccccagccattgcgcagtgtcctggccattgccgtcctgcgggcccaggtagagtttgatcgccagctcaaggtggtgcacgccatcacggtcgcgcaccagcatgtccagctcgcccagggtatgcccggctcggcggatcggcaggttggcggccagcaactccaagcccggcgcatgctgcaccgcaaattgccacaaacgttcgtagtacaggcccaggcgccgggtacgtgacaggctcagccactgctgcaacgcgctgctgtcctggtccagctggcgcagccaggcttcgagctggtgaggggcctgcacccagtcactgccggccagcgggtggcgctgcggccacggcgtttgcgccagcatcggcggcgcgagcatcacccacgccaggtcgcgcacctcggggtggcgcagttggcggggcagggtgtgcaagtcggggaatggcgtcatgctccgagcatagccttttcagcgcccgcaaggtgcctgagaaccattgtcatcaaggcgtggcggcgacaaaggattttgcctgaggcggcctttcgcccataatcgctctttttgcctcacccccagatcccgcaggagccccatggagcactttcgcaatatcggcattatcggtcgcctgggcagtacccaggtgttggacaccgtccgccggctgaagaagtttctgctcgagcgccacctgcatgtgatcctcgaagacaccatcgctgaaatcctccccggccacggcctgcaaacctcgtcgcgcaagatgctcggtgaggtgtgtgacatggtcatcgtggtcggcggcgatggcagcctgctcggcgctgcccgggcgttggcgcggcataacgtgccggtgctggggatcaaccgcggcagcctggggttcctcaccgacatccgccccgatgagctggaagtcgaagtggccaaggtgctcgatggccattacctggtggagaaccgcttcctgttgcaagccgaagtgcgccgccacggcgaggcgatcggccagggcgatgccctcaacgatgtagtgctgcaccctggcaagtccacgcgcatgatcgagttcgagctgtacatcgacggccagttcgtctgcagccagaaggccgacggcctgatcgtcgccacgcccaccggttctaccgcctacgcgctgtcggccggtggcccgatcatgcaccccaagctcgatgccattgtgatcgtgcctatgtacccccatatgttgtccagtcggccaattgtggtcgatggcaacagtgagctgaaaatcgtggtgtccaaagacatgcaaatctacccgcaagtctcctgcgacgggcagaaccatttcacctgcgcccccggtgacaccatcaccgtgagcaagaaggcacagaagttgcgcttgatccacccgctggatcacaactactacgaagtgtgccgcaccaagttgggctggggcagccgcttgggaggtggaggcgactgatgctcgatcccgcgcgtagctacgacctgattggtgacgtgcacggttgcgctcatacccttgagcacttgctcgaccaattgggttaccacaagcagggcggcacttggcgccatccgtcacgcatggccgtgttcctgggcgatatcatcgaccgtggcccacgcatccgcgaggcgctgcatatcgtccacgacatgaccgaggccggccaggcgctgtgcatcatgggcaaccacgagttcaatgcgctgggctggaccacgccggccccgccgggcagcggcaagcagtttgtgcgtgagcacaacccgcgccacgcccgcttgatccacgagaccctgacccagttcgaacaccacccggccgattggcacgacttcctcggctggttctacgacatgccgctgtttgtcgacgccgggcgctttcgcgtggtgcacgcgtgctgggacgacagttttattcagccgctgcgcgcgacgttcccggatggctgcatcgacccgcacttcctgcaagccgctgccgtaccgggcagtttcgcctgcaacgcgttcgatcgcttgttgcgcggtaccgatatgcgcctgcccgacggcctgacgttgactggtggcgatggcctgacgcgttcgttctttcgcaccaagttctgggaagacgaccccaagacctacggcgacatcgtgttccagcccgatgctttgccggagccggtggcacgcacgccgctatcgtccactgaaaagaattccctgctgcgctatggcgtcgatgaaccgctgttgttcgtcggccactactggcgcagcggcaaacccgcgccgatccgcccaaacctggcctgcctggactacagtgccgtgctctacggcaagctggtggcgtatcgactggaccaggaaacccaactggatccgcgtaaatttgtatgggtcgacgttgagcgaccagaggccattccatgagtaccgtagctgtattgcgcctgcccctgagcgtcgacctggggggcttcgtcaagttgctgcaccgcatgcaggtgccgcaccgcgtcagcgaagagtcgggtgaacaggtgctgtgggtgcccgaggccatcagtgacgatgtgcgcgtgttgtatcagcgcttcccagcaggcgacccggaccagcaactggacattcctgagcaggcgcccgttgcgcggccaggttttgttcagcaggtgcgccacagcccggtcaccgctctggtgttgttggccagtctcatcgtcgctgccgtaactctgctgggtgaaaacctgcaagccatggcctggttgaccttcctgccgttccgggtgctgggcgagtacatccagttcacgccgctggccgacaccctggcctcggggcagtggtggcgcctggtgacgccgatgctgatccacttcggcatcctgcatctggcgatgaacggcatgtggtactgggagctgggtcggcgcattgaagcgcgccagggcagcatcaacctgctgggcctgaccctgttgttcagcctggtctccaactacgcgcaatacgcctacggcggccccggcttgtttggcggcttgtccggcgtgttgtatggcctgctcgggcattgctggatctttcaattattgtcgcccaacccggcctatcgcctgccccgtggggtgctggtgatgatgctggtgtggttgctgctctgcctgtcggggctggtctcgatgatcggtttcggcgaaatcgccaacgcggcccatgtgggcggcttggtcatcggttgcttgacgggtttgctcggcggtttgtacaaccgtcgcaaagcgtctctttgataaggaagagccttatgtcctcttttgctgaaatgatcgaaaacatcaccccggacatctacgagagcctcaagctcgcggtagagatcggcaaatggtccgatggccgcaagctcaccgccgagcagcgcgaactgtcgctgcaagcgatgatcgcctgggagattcagaacctgcccgaagaacagcgcaccggttatatgggcccgcaggagtgcgcgtccaaatccgcgccagtaccgaatatcctgttcaaatcggatgcgatccattgattgaaattggtcgcggtgcagtcagcaaaatgtcggcgcaactcggtgagccgaccgttcaatacgcctttcgcttaggaagcacagaggtgccggtcaatccgttgatcggcacccatgtacgcctggaatacctgggcgcgattcattgcagccattgcgggcgcaagaccaagaccagcttcagccagggctattgctacccgtgcatgaccaagctggcccagtgtgacctgtgcatcatgagccccgagcgttgccattacgacgccggcacctgccgcgatccgggctggggcgagacattctgcatgaccgaccacgtggtgtacctggccaattcgtcggggatcaaggtcggcattacgcgggctacgcagttgcccacccgttggctggaccagggcgccagccaggcgctgccgatcatgcgcgtggcgacgcgccagcaatcgggcttcgtcgaagacctgtttcgcagccaggtggccgacaagaccaactggcgcgctttgctcaagggcgatgcgcaatcggtggacctcaagcaggtgcgtgacgagctgttcgcctcttgcgccgagggcttgctgggtttgcaggaacgctttggcctgcaagccatccaaaccattgccgacatcgagccgattgaaatccgctacccggtcgagcagtatccgaccaagatcgtcagcttcaacctggacaagaacccgattgccgaaggcacgctgctggggatcaagggccaatacctgatcttcgacaccggcgtcatcaacattcgtaaatacacggcctaccagctcgccgtgcatcagtagaaggatccccagcatgcgcaccgaacaaccgaagatgatttacctgaaggactatcaggcgccggactacctgatcgacgagacgcacctgaccttcgagttgttcgaggaccacagcctggtccacgcgcagctggtgatgcgccgcaaccccgagcgtggtaccggcctgccaccgctggtgctcgatggccagcagcttgagttgctgagcgtcaccctcgcggatcaggaactgaccgccgccgattaccagctgactgacagccacctgaccctgcagcccccgagtgaaaccttcaccctggacaccacggtcaagatccacccggaaaccaacaccgcgctggaaggcttgtacaaatctagcggtatgttctgcacccagtgcgaggccgaaggtttccgcaagatcacctattacctcgaccgcccggatgtgatgagcgtgttcaccaccacggtgatcgccgagcagcacagctatccggtgctgttgtccaacggcaacccgatcgccagcggccctggtgaagacggccggcactgggcgacctgggaagacccgttcaaaaagccggcctacctgtttgcgctggtggccggtgacctgtggtgcgtcgaagacagctttaccaccatgaccaaccgcgaagtcgcgctgcgcatctacgtcgaaccggaaaatatcgacaagtgccagcacgccatgaccagcctgaaaaaatccatgcgctgggacgaagagacctacggccgcgagtacgacctggacatcttcatgatcgtcgcggtcaacgacttcaacatgggcgccatggagaacaagggcctcaacatcttcaactccagcgccgtgctggcccgcgccgaaaccgctacagacgccgctcaccagcgcgtcgaagccatcgtcgcccacgaatacttccacaactggtcgggtaaccgcgtgacctgccgcgactggttccagctgtcgctcaaggaaggcttcaccgtgttccgtgactcgggcttctctgccgacatgaactcggccacggtcaagcgcatccaggacgtggcgtacttgcgtacccatcagttcgctgaagatgccggccccatggcccatgccgtgcgccccgacagctttatcgagatctccaacttctacaccctgaccgtgtatgaaaagggctcggaagtagtcggcatgatccacaccttgctcggcgccgagggctttcgcaaaggcagcgacctgtatttcgaacgccatgacggccaggccgtgacctgcgacgacttcatcaaggccatggaagacgccaatggcgccgacctcagccagttcaagcgctggtacagccaggccggcaccccgcgcctggcggtcagcgaggcctacgacgcagcggccaagacctacagcctgaccttccgccagagttgcccgcccactccggacaaggtcgagaaactgccctttgtgatcccggtggagctgggcttgctggacgggcagggcgccggcattgccttgcgcctggccggtgaagcgacggcgggcgacacttcgcgggtaatctcggtgaccgaagcggagcagacgtttaccttcgtcgacatcgctgaaaaacccttgccttcgttgctgcgtggtttctcggcgccggtgaagctcagcttcccctacagccgtgatcaactgatgttcctgatgcagcacgacagcgacggtttcaaccgctgggatgccggccagcaattggccgtgcaggtgctgcaggagctgatcggccagcatcaggcgggccagccgctgaagctcgatcaacgcttgatcgacgcgctgcgcacggtgttgagcgatgaaagcctggaccaggccatggtcgccgaaatgctctcgctgccgagcgaagcctacctcacggaaatcagcgaagtggcggatgtggacgccatccacgctgcccgcgagtttgcccgcaagcaactggccgacaacctgttcgaagggttgtggctgcgctaccaggccaaccgcgagctgtccaagcaaacgccatatgtggcagaggccgagcacttcgcccggcgtgcgctgcagaacatcgcgctgtcgtacttgatgctcagcggcaagccagaagtattggcggccaccctggatcagttcgacaccagcgataacatgaccgaacgcctgacggcgttggcggtgctggtgaactcgccgtttgaagcagagaaagcccaggccttggcggtgtttgccgaaaacttcaaggacaacccgctggtcatggaccaatggttcagcgtacaggccggcagcaccttgccgggcgggctggcgcgggtcaaggcgttgatgcagcacccggcgttcaccatcaagaaccccaacaaggtacgcgcgctggtgggcgcatttgccgggcagaacctgatcaacttccatgcggcggatggctcgggttaccggttcctggcggatctggtgatccagctcaataccttgaacccgcagattgcctcgcgccaactggcgccgctgacccgctggcgtaaatacgacagcgcacggcaggcgctgatgaaagcggagctggagcgcatcctgggcgcgggtgagctgtccagcgatgtgtttgaggtggtcagcaagagcctnnnnnnnnnnnnnnnnnnnnnnnnnnnnnnnnnnnnnnnncgcctgttccaggtgatgttcgaggaaggcgtggtgatggtgtgtacgtccaaccagccgcccgaccagttgtatgccgatggctttaaccgtgagcgtttcctgccgggcatcgatgcgctcaagcagcatatgcaggtggtggcggtggacggtggcgaggatcatcgcttgcatcccggcgctggcatgcagcgctattgggtgaatcaacccgaggcactggcggcggtgtttcaacaattgagccaagggcaaaccgtgatccgcggggcattaagcgtagggcaccgctccatcatgacggtgcaggccagtgacaccgtgctttggtgccgttatgccgacttgtgcgagcagcccctggccgccatggatttcatgctgttgtgtgatcgcttccgcgccatcctgctgggagacgtccccaacctcagtgcacagaaacgcccgggccgaattgcccgtggcactgaagacggcgccgagcgcgtggtggctggggatcgagagttgccgcagttgtcggtgcacgatgacagcgtacggcgctttattgccttggtagacgaatgctacgaccgtaaggtgccgctctttatcgaagcccgtgtgccgttgcagcacctgtacaccgatggttacctggaatttcctttccgtcgcaccctgagccgactgcaggagatgcaattgcaacgcttcgctatctaggaaaaatcgccgcttgcgggctcattgcgcgctttgatgcgcgcaaccttcgcactttctgtcagctatttgtcgcgtatctccttcatctactgccgactccacgcttacaatcgcccctctcaaagggaaacgattccctggtggtcgctatcgaggaaggaaatggataccccagacatcctggtgctgcaagccagctataccaacgccgtgcacgccgacgccattggcctgctgctcaaccattacgctgaagatccgatgggcggcggccacagcctgccagccgatctcttgcagcaactgcccgccgagctggccaagcgcccacacgcgttcagcgtgttggcgtttgccgcaggtgagccagcggggttggtcaattgctttgaaggcttctcgaccttcgcctgccggcccttgatcaacgtccacgatgtggtggtgaaggagcaattccgcggcttgggcttgagtcagaagatgctgcaaaaggtcgaggaaatcgcccggcagcgtggttgctgcaagatcaccctcgaggtactgggaggcaatgaattggcgcagtcggcataccgcaagttcgggtttgacgactcagtgtttgatcccgcccatgggcggatgctgttctggcataaaccgttgtaataaataaccggcaaaaaaagggcgccattcaatggcgcccaataagccttcgccaacggagcagaatggcgcagggtgctacggattaagtaagcattaaatcaactgttcggttgtgcctgatcgacagtctccgatttaaccgacttgccatcggcgctggcaacttgctgttcagccttgccgtgggttttttcctgaataaagctgaagttgttgtagaactccttggagcgttctgcaccgccctctgcaaaggcggcggcggaggtcagggtgatcaggctggccagcatcaaggtcgacattttcatcgcggtattcccaattaaaagtgataggtgtccggtcgctccgtgatcagatcatggagcgactatggcgttatcttattaagtgggaattaactgaaagtgcagttgaagttaacagtttcgttaacttcaatgtgcgcggctacagcttccaatccagcgccaacgtgacggaacgcggctcgccccaatacacaccgttataaaaaccaacgcgctcgtagtatttcttatcaaagagattgttcacgttgaccgacgccgaaacctgttcgtcgaactggtagcgtgacatcaggttgaccacggtatagccctgttgcgtgattttcgcccgggtggtgatcggccggccgtcgctgttgcgctgcccggtcgggcggttgctgaagtcgtaggtttcgctctgccagttcacggcgccgccgaccgtcagattgcgccaggcgcccggcaggcgataggcgctggagatcttcagcaggttcaagggttggctggtgttagtgcgtttgtctgagccattgaccgaatgggtgtaggtatagccggcggtcagattccagtttggcgtgatttccccggcggcttccagctcgaagccgttgaccttgttacctttgccgccggatttgtagtattcctcgccggtgaccggattgggcggtactgagtcatctcgctcggcgacgttgtcctgggtgctccagaagtacgcagcggccaggttcaagcgctcgttcagcacactgcccttgaggcccacttcgtagttactgccgaccacgggctccaggtacttcttgttggcatcgcggttgttctggggtttgaagatgtcggtatagctggcgtaaacggtgtattgcggcgtgatttcgtagagcaggccggcgtagggcgtccacatatcattgtgggtctggctggttttgcccgacgcggtgagttggtcgttggcattgtatttgggctctgcgctttccagctcccaactgccgtaacggctgcccagcacggcgtgcaagcggtctgtgaggctcagccgcgtggccaggtaaccggctttctgttgcttcttgctgtgctcacccttcaggtcggtcacctggtcggtgaacttgccgatgccgcccatgtgcttccagtcctggatggggtagtagctgtctggcaggtcgctgcgcataaagggcgagacatcccgttgcgcagcttcgccatagcccatcatcagcgcgtgttcgcggcccagcagcgtgtagctaccggccaggttgaggtcgatggcctccatgcgcgaggtaccgcgcatatggctggcccaggccgtcatgccgctgcggtcggggttggggaagccggcgccgccgtaatacaccttgccatcggtgtcgctttggcgatgggtgtaggcggccttcaagtgccagtcgccgccgagccggtggtcgagggtggcgaaggtggtcttgtcggtcagtggccaggagctccagtgcgccgccatgttggtggagcggggtagcctggccttgccgccctggctgttccagtagggcacggtgccccaggaggtgccctgtacctgtttgtcctggtaatcaaagccgacggccagcacggtatcgtcggaaagatcagcctcgaggatgccgtagcccactgcccgctgcagcccatagttgtcacgaaaggaccgactgtcgcggtaggccagcacgctgcgcccgcgcagcttgccgtcgaacgccagcgggccgcccacatcaacgtagctgtagtagttgtcatggctggcgccactgatgccggtcttggcctgccactgcgcggtagggcgcttgcgcaccatgttgacggtggccgaagggtcgcctgcgcccgtggtcaggcccgtcgcgccgcgcactacttcgatgcggtcgtagatgatggtgtcggcgtcggtcttcatgtagccgaaggtgttgagcatgccgtcaacctggaagttgttgatgccatagcctcgggcggagtagtagacacgatcggagtcgtaatgctgaacgttgacgcccgtggtctggcgcaacacctccgtcagggtattaagattgaagtcgtccatctgctggcgtgtgaccaccgagatcgattgcggggtttccttgacggagaggttcagccgcgtggcggtgctcatcgaaccggtggtgtaggcgccggtatgctcggtggtggagcccaggccgtcggcgctgatagtggtcgcgcccagttccaaggcttgggtaggggctgtttcgggggtggtgtcggccagcgaatccgggctcagtgccaggctgaacaggccgagggtgaaggtcatggaacgggtgaagggcgcgaacatcactgcagactccttgtcgtctttgatacctccccaggcagggagggcatggttcaaagacgaaaggagctgcggaactttaggctcaaacgagaatgattgttatctttctgttacaaggccctggcttacttggccaccacttcggcgccgtcggccttcttgggcttgatcaggctgaagtcgatcagcgccttctgcttggtctcgtaagggttgccgatcaacagcgggcgtggcttgaagctgtcgctcaccaggctcttgctgtggtccagttcgtcgaaactcaagcctgccatgtcggcccaggtgtggatcaactgcgaactgctgtaaggccgctgcaagtcgccggcaaagctccagtcgtggctttcgcgccattttggcgaggcgtaggccatgaacgggatggtgtacatcggcgcagtcggcttgccttcgttacggcccaaggtgtcatggccggcggagtcgaacacgtcttcgccgtgatccgacaggtacagcaaaaagccgttggggtcggtcttggcgtagtccttgatcaggctggagaccacgaagtcgttgtacagcacggcgttgtcatagctgttgtaggtcggcaactgcgcatcgctgacacccgccggcacgccctggcggtcggtgaacttgtcgaaggttggcgggtagcggtactggtagctcatgtgggtgcccagcaggtgcaccacgatgaacttgcgctcggcggtatcggccagggccttggaaaacggcgccagtacatcgccgtcgtactgacgggcgttctggttgcggttgttgttgaggtacacctgctcgtcggcctgttcggaaaaggtcgtgagcatggtgttgcgtttggtcatggtctgctggttggtgatccagaaggtcttgtagccagcctgtttcatcacgctgacaatcgacggcgtcttgaggtacaggtccgggttttcttcgtcggcgaaggtcagcacctgttgcagtgcttcaatggtgtaggggcgcggggtgatgacgttatcgaacacggccaactggtcgcgcagcttgtccagttccggcgtggtgttgcgcgggtagccgtagaggctcatgcgctggcggttggtggactcgccgatcaccaatacgagtgtggacggctggccggccatgctgtccttgaggttgttcaagggcgggatcttgctcgcactggtgagcatgccttgcatgttgtccagctgctcggtgtagcgacggtaggcgacgatcatctgccaaggcacggcaggctcgatgcgggtttcgaaacggtcgatggccaattccatggtttcgctggtggcgatctgcttgaccagtgggtagcccaccactgccaggacgatggcaatggctgccacgatcgactgaccgcgcggcaggtacaccgggcgcaagcgcgtccacagaaagatggcgaaggcggtgtgggcaatgaacgccagcacgatccaccaggcaaagtattgggtggcgtattcgccggcttcagagatgttcgactcgaacatgatgaagatgacgctctgggagaactcctgctggtaaatgaagaaataacccaggctcgccatagagcaagcccacagcaccacgccgatcaaggcggcgagcaggcgcgtacgacgcgggaatagcaacatcggcgccagccacagcgcactcatgaagaaggcctggcggaagccactgaagccggaggtgccggtcagttggataagaagttgggtaatacccgagaaataccagaaaaacaggaataaccagccaaggccggcccaatcaaagcctttcgcagtcgtcgtgctgcgtttgaacatcgccatccagcgccccatcagaaaaagattgtcgcgcacaggcgcgcaacatcgggccgcccaggaagtgagcggcatcgcggaacgggagtatcaagaggggagtgtgaaaactttgtgagttttctgtaggtattgccttacaaggctactggcgcgggcttcagcacagcgcaggcttggcatccgacggctgaacgagatgggcttgaaggtgtgaacgcaggcgcaggacttcctgttgcaactgatcacgctcgtctttcaactggcgcagttcatcgcgacggatagtgacgtagagggtctgtggcggacgggtcatctgtgctgtgctcattgcttacctcgcaaatagccggtagatcgcggtgccaaaacaggtttttggcaacagtcggaagcaagtttgaattctttttcgctgcaagggaacttttttatttttggtggtcgtgtgacttttgccggggtgatggtgaaacgatggcaacttttttgtcatgaaactacacggatccgctctggactaaccctcattagcctcattgcgctataaactatgtcacacattttttagaagttaggagcatcagcacatgcaactggggattatcggactaggccgcatgggcggtaacattgcgcggcgcctgatgctcaatgggcataccaccgttgtatacgaccgtaacgaagccttcgtcaaagccctgagcgaggagggcgccaccggcgtcgccgacttgaaagcgctggtggccggcctgcaaaagcctcgcgctgtctgggtgatgttgccggcgggcgcgcccaccgaagacaccatcaacgtgctgagcgaactgctggaagacggcgatgtgatcatcgacggcggcaacaccaactacaaggacgacgtgcgtcgcggcaaggccctggctgaaaagggcctgcactatgtggacgtgggcacctcgggcggcgtctggggcctggagcgtggctattgcatgatgatcggtggcgacaccgagaccgtgaatcgcctcgacccgatcttcaaaagcctggcgccgggcctgggtaacatcccgcgcaccaaggaccgttcggcctctgccgacccacgtgccgagcagggttacatccacgccggcccagcgggttcgggccacttcgtcaagatgatccacaacggcatcgagtacgggatgatgcaggcgtttgccgaaggttttgacatcctcaagaccaagaactcggagaacctgccagaagaccagcgctttgacctcaacgttggcgacatcgccgaagtctggcgtcgtggcagcgtggtgtcgtcctggctgctggacctgaccgccgacgccctggccaccgacccgaaactcgacggctactcaggctccgtggccgacagcggtgaaggccgttggaccatcgaagcagccatggagcaggccgtgccggttccggtgttgtcgacctcgctgttcgcgcgtttccgttcccgccagcagagcacctacggtgacaaaatgctatctgccatgcgcttcggctttggtggccatgtggagacttccaaaaaatgaccgccaacggcaaaaaacccaaggccgaacctgctccacccaccaccttgtttctgtttggcgcccatggcgacctggtcaagcgcctgctcatgccggcgctgtacaacctgagccgcgacgggttgctgggcgatggtctgcgtatcgtcggcgttgatcacaacgccatcagcgatgcggactttgccaagaaactcgaagacttcattcgtaccgaagcctccagcaaggtccggggcaatgccgaaaacgccctcgaccctgcgttgtgggcgcaattggccaagggcatcagctacgtcgagggcgatttcctcgacgacagcacctatgccgatatcgccagcaagatcgctgacagcggcaccggtaatgcggtgttctatctcgccactgcaccgcgcttcttcagtgaagtggtgcagcgcctgggcagtgccggcttgttgaatgaaaccgacgatggctttcgccgcgtggtcatcgagaagccgttcggctccgacctggccaccgccgaggcgctcaacgcctgcctgctcaaggtgatgagcgagaagcagatctaccgcatcgaccattacctgggcaaggagacggtgcagaacatcctggtcagccgtttctccaacgtgctgttcgaagcgttctggaacaaccactacatcgatcacgtgcaaattactgccgctgaaaccgtcggcgttgaaacccggggcaacttcttcgagaagaccggcaccttgcgcgacatggtgcccaaccatctgttccagctgctggcgatggttgccatggaaccgccggcagcctttggtgccgacgcggtgcgcggtgagaaagccaaggtggtgggtgcgatccgcccctggtcgctggaagatgcgcgggccaattctgtgcgcggccagtacaccgctggcgaaatcgctggcaagccattgcccggttatcgcgaagaagccaacgtcgcgcccgacagcagcaccgagaccttcgttgcgctgaaagtgatgattgataactggcgttgggtcggtgtgccgttttacctgcggaccggcaagcgcatgagcatccgcgacaccgagattgtgatctgcttcaagcaggcgccgtatgcgcaatttcgcgataccgaagtcgatgagctcaagcccacttacctgaagattcagatccagccgaacgaaggcatgtggttcgacctgttggccaagcagcctgggccgaccctggagatggccaatatcgaattgggctttgactacaaggacttcttcgaaatgcagccgtcgacgggttacgaaaccctgatctacgactgcatgaccggcgaccagaccttgttccagcgtgccgacaacatcgagaacggttggcgtgcggtgcagccgttcctggatgcgtggaagcaagatgacggtatccaggcttacaaggcgggtgaggatggcccggcggcggccgatgccttgctggcccgcgatggccgcgcttggcatagcctcggatgagtgacgcgacgattcatcccatccggtttgtcctcagtgatgtggacgggacgctattgcatcccgaccacagcctcagccaacgcaccgccgatgccattcgcgcgatgcgcgaggccggggtgcttttcagtctggccagcgggcgtccgcccaaggccatgcggcatttgatcgaaaccttcggtattgatgtgccggtggcgggcttcaatggcggcacgttggtcaacccggatggcagcatcctggttgcccaccatctgccggcggaagcggcactgatcaccctggcgctgttttcggccgagtcggacgtggaagtctgggtgtttgccgatggtgactggctgcgccgtgatccgcccgggcccatggtgcagcgcgaagctgatggcttgggctatgggccggtggtggtagagagtttcgagccgtacctggaccgggtcgacaagatcgtcgccgccagcaacaacacccagttgttggtggagcttgaagcgcaattgcagcccaaagtgcaggggttggcccaggtgtcgcgttcgcaaccggtgtacctggacgtgaccgcgatgctggccaacaaaggcgaagccttgaaaaccctggccgagcacctgggcgtaccgcttgcgcaaacggccgcgattggcgacggtggcaatgacccggcgatgtttcatgtggcggggttgtcgattgccatgggccaggccgaagaaaccgtcaagcgccaagccaatgtggtcaccggcagtaatgtcgaggacggcgctgccgaggcgttcgagcgttttattctcaccgcacgttaatgactgacgtatgactgcacaacttccagctcaagttttacttgggctggaagttgctgcatgcaattacttcggcattgcccactgttgcaactggtggccctctttatcgagctcggcacgggcctgcaacaataggttttcaagttgagccgggtcggtatacgcagtggaggacagctgtttgctgccgatgcgggtgttggtacggtcgatgacgctcaggctgagggcgccaacgccatcgtgccaggccacgcactgaaagggctggaaagcacggtctgcaatcaaaagagcttcgttgatgcgcagcggagcgttcatttgggtcttctctctgtatgcccattcaagtgagtaccggcggttgggctgaccgtgcggtgggttacttgtactgatgcacgatggtggggtgcgggtcacatgctagggcaagaaattttaactttccctgattgacgtcatgtaagcggctgttttgaaagcgcaataagcctttcactggcgggcaacttcgggcgcgctacgaaacaggcatggctttttgcccacacttatagcgaaatggtacaaggtcagcgtcaagatcttgctagggttaccagcagtcgccacaaactgttgtttctaaataactttaacaatcttggcgccaaggaatagtcatgattgcgacgcccccccaacgccgcttactggtggtcgacccctgtgacgactgccacgggctcttgcccggtttacgcaccgccggctgggaagtggacagctgtgccctggaggcggtgggtgagcgctcctgcgatgtgggcctgctgcgtttgcaacgtgaccacctggaacgccccgaagcggtcaaggagttgattggtcgcagcggcaccgagtggatcgccgtgctcagccaggatgtactgcgtttgcagaacgtcggcgattttgtctgcgaatggttcttcgacttccacaccttgcccttcgatgtgtcccgggtgcaggtgaccctgggccgtgcgttcggcatggcgcgcctgcgtggcaagggctacgcgccggtggatgagccccacgaattgctgggcgagagccgccccattcgtgagttgcgcaagttgttgtccaagctggcgccgacggaatccccggtgttgatccgcggtgacagtggtacgggtaaagagttggtggccaagactttgcaccgccaatcccaacggcacgccaagccgtttgtcgcgatcaactgcggcgccatccctgaacacctgatccagtccgagctgttcggccacgaaaaaggcgcgtttaccggcgctcatcagcgcaaaatcgggcgtattgaagcggccaacggcggcacgctgttcctcgatgaaattggcgatctgccgatggagctgcaagccaacttgttgcgctttcttcaggaaaagcacatcgaacgcgtcggcggaagccagccgataccggtggatgtacgcgtgttggccgccactcacgtcaaccttgaggccgcggtggagaagggcgcgtttcgcgaagacctgtattaccgcctgaatgtcctgcaagtggtcaccgcgccgttgcgtgaacgccatggcgatgtggcgatgctggccaaccatttttcacgtttctatagccaggaaaccgggcggcgcccgcgcagtttcagcgaagaggccttggtggcgatggggcaacacccgtggccgggcaatgtgcgtgaactggccaaccgcgtgcgccgcggcctggtgttggccgaagggcggcagatcgaagcggttgacctggggctgcaaggccagcaggttatttcggcaccgatggcaacactggaagactacaaacaccgcgccgaacgccaagcgctgtgcgatgtgctcaaccggcacagcgacaacctcagtgtcgcagcccgcgtgctggggatttcccggccgacattctaccggttgctgcacaaacaccagatccgctagggcgggtannnnnnnnnnnnnnnnnnnnnnnnnnnnnnnnnnnnnnnngattctgtgggcaatgcatggccaatgtgggagctggcttgcctgcgaaagcggtagtgcagtcacagatgcagcaactgacacaacgcctgcgggcaagccaatcagaagtaatatgggaatttcaggctgaacgtaaagtccggcgcatcatcggtcatcccaatcgccaggttcggcacgatggtcaggttatccgaggcggcaatggtcatgcccacgttgaaataaccggcgttggcatcgctggacaccaccgattgccagtcgccgccatccggcttgagcttgctcttgcgttgcaccaggtcggacaccgagaacgacatgctcatcttctcgttcaaggcaaacgctacgccgaccccgaactggaagctgtcgcccaggcgcaccttgcctcccaccttctgattgacttcactgctgatgtcatcgaaagagtcttcaaagttgtgggtgtacgacaacgaaccgaacaacacggccgggtcgaaggtcttgaccagggagatgcccggtgtaacagaccagaccccgttgcccgtcggcaggctttcgggcacgtagaggttgtcgttgttcggttgcttgaccagtttgatgccgaaaggctccttgcccgtcggtgccttgacgcgcacggacaccaccgcatccggcaaggtcggggtttcgtcgaggaacttgtaggccacgccaaagttgacatcgccgatggtcgggtcgcgggtcacggagccttcggaggtggccgtggcgtcgttgccggcgccgcccgactggtaggtggactcgcggtacaccaccggcacgttcaggtcgaactgccagcggttgtcgacgttgtagcgcccggtgaggtccagggtccagctgtcggacttgatccggtccaggttgatgttgcccaggaagatcgagtccagcgccaggaaaccattgagcgtcaactggcgcgcgtcataacgggcatacgtgatgccggtttccacgctgaacttgccgttgccgaaaaagccgctggcttcgttgtacaggttgctcacactttgcgcaggggccgagtcgtccttgagggcctggccgtaggagctgccacctccgccagcgcctccggacgccgcggctgcgcccgtaccgctggccgcgacagcgttagcgccgttcttgaagtcggcaggtgatttagccaggcgcctgggggcaggcgttgccggttggtcctcgacctggcgcacacgttgctccagcaccgccagggctttttgctgcacgtcgtaacgttgcttgagttccagcagttccttcttcagggtttcgatgtcagcgtctggcgcggcatacagtacggatgcgggcaagagcgtactcaaacaaaccaccgcacgtagcgataacgatcgatgcatgaaataagccgtccttttctaatgcgtaagtgtcgagggtcagcgtagttcaataaccgagcgtgcgtaggcctttaagttgatccaggttgcagttcaacgcggcgttgttcagcccgttattgttcatcacaacattgatctgggtgatgtttctgacaaggttgctatcgccggtcaaaaccgtgccctgcagcacgttccccgcgccgatctgttgcaggctgttgccctggttgtgattggcctggatggccatctgcacgccggcattgtttgccgaaacgctgacacggcccgcggcgctgtcgccggtcactgtgccgccagccaccagcacctggccggactgcaggttattggcgggggtaaccccattctcgacgttgatgcccacattgttgtaggcggcgttgccatcgccggcggtgcgtacactttgggtcacgccctggccgctgccgaggccggcacccccgaccacattgccggtgcccgtgttgggaggggtaccggtaccggtcgagccggtggtttgcacatagaactgaggagtaatggtggttttatcgatctgcatgttggccgtgccggtgatgttgctaccttcggcattggtccaggtgctgctcatgacaatgccaaagctgatgatgcgccccggcatcacgtaacggccacgcagctcggccatttcggcgtccttgagttcgatgggcttgaaccccgaggacgcataagcaggcattgaggcggccagacacaagaccgtcagccaacgggaagtgttcatctgctgctcctggggcgtcctgccccttattgcgcttctagaagaagtcgctctggataaaaccgaaatccatcagctcggcatcgcccacgggccggaactcattcatctggctcttggcggtcagcggcaggggcgggtcgagcaacacgttggccttgtcgtaaccctcgcccagtacggcgaagacaatgccattccagcctttgacgaaatcgtcatgggaatagcgcttgtggcccaatacggggtcgccgatgtacacccagtccttgtcggcccgttgcaacaccacgaagtgcttgtagccgcggatttccagcagcaccaccacggggattttcacggtcagcagggtctcgggcgcgatcttgtagccccgggcacgcatgccgatgctttcgaggtagcgcttcatatccagcatggaaaagccctgggttcgtaccaggtcctggtcggcagtgaccagcatgcctttgatgatgtgtgcttcgtcgacgtccagccaataggcctggcgcaggatggtggcgagtgccgcggcaccgcagctgaaatcggttttctgttccaccaggttggcgaaccggcgctcgcgaatactctcgaccttcttgaaaatcaccgcaccgccgggcatggcggaaatcgccatggtgcctgcccaggtcgtgccggtgagcaacatcaagagggtaagggtcgcgatacgcatgatcgaatgacctgttggacactggaataaaaaagggccttgtcgccaaggccccgttggatcagaagcgcacgccgctggcgcagacgctgcaaccttggccgatcgacaggctgttgctgccttggttgcccgcacccgattgcaggttgacacctacgttgccggagttgcggttaaccgagttgtcgaggcttgcgttgttggacacgtactgaggcttgccataaccatggctgctggcggccgtgttcaggtagctgttgttgagagagttctgctcggtgttggaggccgctgcgatgttcttgccgtcagcggtggtgatggccaggttgtttttaccctggttgccctggccggcctggccgttgtaacccacgttgccggagttgccggtgatggagccgtccagggaggcgttgttttgcgtgcctttattgacgaagttgttatgcgagctgccttggtcgacatcaatcacggcaaacacggtggcgaagtcgcctttggcactggagatggcgccggcgttgtcagcctggttgccggaacctgattgtgcgttgaccccgacattaccgctgttgctatttaccgagttgtcggctgatgcgttgttctcggtgttggtgtcgtcgaatttgttgtgttcgcttttttgcacatcggtgacgacagcggccacggtaccggtgggttgtggggttggatgccagccacccgcttgagcagcagcagccatgagtgcggcgagagcgaaaaccattggtttcagagccatttgaggtttcatggtgtttctccttgcttctaattagttggttaagtgttggtacggtctaacgaacgtctaccaagcggttacttgatagtgatgcccagggtgttagccactcggttccccaccccggcactctggttcacctgtgtcactcctcggctgccggtgaaggcctggtcgctggtcacgacctggcggctgccagtggtgggggtgagccctgagtcggttgccagcgtcgtcgtgttctgttgcaacaggacgctgtcatcgatgctctgcgggccagggttgaggctgatccgcacagcgttgatggattggttattggccccggccgcctggttgatgcccagcacaccgttgccactgctgaatgagttgccctggatcgctgccttggcgttcagggacgggtcgaccttgccgtcgacgcgctgaatgtcgacgttggtggcctgaccaccgagcgcgatggcgcgactgttggacatttgttgctggttgccggcggcctggttgaccgacagcacaccgtcgtactgctggccgctgttgttgatcacggcagtgttgtcggccatggccgtggcgctgcccagcagggcgactatcaacagggcgcgcttcatcacttgccccccatcatgctgccgagattgttgagcggcgccatgccacgctggatcgagtcgctgatctgcccgcccatgctgctgccgctgcccgcaccgtggccggccgctgcgccagcgccaattgtcgacatgctgttttgggtggcgcccaggcccgacaagctgccattgggctgaagggtgcgggcaaggctggaaccactgctgatgccgccaatgtccctgtcgctgagttcgccggtcagggcgctgttgatctctttgctggggttggcattggccgtgttggggtaggggtcgggcagcgaggtacgcccatacatatggccctgcacggtgcgcccggtcacgatcacgccgtcacccgcctggctcgtcaggctgacaccggcactgagcacacagctgatcagaagtacgtttatcgacgaggcgtgtgtgagtgtgttcacggcggcagtccttattcttcacgctgaccctaaacagcgttatcagggaaggagcaggaggcgtgccgctttttattagatgttgttattcaaggggttgggcttaagtcgaggcaaagtgatggcaactctgtttcagctttgaaacagccctgagcgcttgagatatgcctgtactcacctcacgctgtctcagcgatgtaacacttcctgtgacagaaccatgaatccgcacacggcgtgcgatgcaggcgaggcaggtgtttcaaaaatggacacccgcggcccaaacgtacccgttcgtgcgagcgggctcagcccttgggagttttacgcggaatggaattgagcaccgggttgccgtcctggttttgggtcaggtagaccggcaacaccttgggcagggagggcacgaggttgttgacctcgttgatgttgtagataccgccgatgcgaatcgcgccagtactggcgtcggcgagcatcaccggctttttcaggtagcggttgatcaggggcagggcgtccgtcagggtcaggttgtcgagcaccagtttgccctggcgccatgccagcgcagtgtcatcgggattaatagcggcgacctgcggggtggcgtcaccctggcggaaactggcttgcatgccagggctcagcggcacactggcatgctcgccgtcgctggaaatctgcactgagccctccagtaacagcacccgcacctggtcttcatattcccagacattgaactgcgtgccggtcactcgcacctggccttcgccggcccgtacgataaacgggtggttactgtcgtgggcgaccttgaagaacgcttcgccctttttcaaggtgacccggcgctggtccttgtagtggctgtagaccaactcggtgcccaggttcaactccacttggctgccatcgcccaaggtgacttttttcaagccattggcggcttcgaagcgttcataggaactgggcaaccagcccgcttcccagccggtgaaggcggcaagcggcaatgccgccaggcacaccgctgcggctaccgcgtaggtacgcaggcggctgcgcggcttcttgaggggcaccaccaccgcgtcaggcttttcgcgaggcagaagatcggccacgtcccagatctcgagcatggccgcatattcgaaggcgtgcagcggatgagcatcgtgccactgggtaaaagcctgacgttcgcccgctgtgcaatctgcagcatgcaggcgcatgcaccaatgcgcggcggcgtcggtgatggcgtcatattcggtttctgaaaggggcttttcgctcattaactcatcctgatttcccacattctaacctcccaaggtagacggcgagaaccgcatcatggcgattgcacatcaattggaacttattcttgtttgcgtgcgcctaaaaaatcaggaattaacctgtcgtccactatggagtacgaaaatgttgaagaaaaccttgatcgccctgtgtgctacttccgcgctgttgagcgctggcgccgccatggccgacaagccgggtgcaggctggatcaccattgaaaaagccatcgaggtggcgaaaaccaaggccggctacgttgaagtctacgccgctgaagccgatgacaatggctattgggaagtcaaaggccgcaaatccgatggcaccgtatatgaagcccgcatcgatggcgcttctggcaatgtgctgcgtgaccagaaagactgatgttcctgccgggggccgctcaggctcccggctccaggtagcgcccaaggtgggtgatcaggtatgtcactgagtctgcgttggccaggatggtatcaatgcgtttgtcaggtaccgacatgaagatgaccctggcgtcctgcaaggtcttggcgcccgtcgccttgaaaattttcttttcagttgccgagcctggctggaaatcctcccacagctcggtgagactgtcttgagtcttgaacagcatggttgcaggcgtcatcgtcgataacgccgtgctgcgcagatcttccagggtggttttaagcactgcggcgccgggcctttggatattgatcaagtccgggaagggccgcatgctgtccaggtaggcgatgtctacggtgtccagcttcaagtgcgtcaattcgtgaatcagcgtactggccctggcgtgcgtcgatatgttgaaggccacattttccagcaagcggttctgataaacgtccagattggggtcgaagaagcggctcagcagatacagttttcgctctctgtcggcgggaatcatgaacgcataatccgatgcgggatcctgtcggctggtgcccaccacaaaacgcatggaatttggaccggtcaagctggggtcggtgagctcattgattatctcgtcgattattttggtgactttcgaaacctggtccggcgtcagggtgacgacaccgaacatttctcccaaaaagcgcccaacccggctgttcgggtcgcgttgtgtggcgaattgcgcgacgttgcggcggcagttcagcgcgtaataagtcgcaaagttcagcgcttcggtgatggcttgggctttccagtaggtcaacgcaccgatatcgcggatgcccaccgcttcaatattgatatcccgtgcttcgtttcgccatgtcttgaggtatgactgagccctgccgaagcgcggctcttggtcgcccagctccagtacccatatgccctgcgtattgcgaccgatgtacggcccaacctgctcatcgttggcgaggcgccagcgttgtgcggctttcttgacgctatacaccttgccggccagcggcacgtagtatttcgaggctttgcggtcttcatacacctggctgagcctgctttttttcaggtcttgcaatgccacatcctgtgcctcgaacggctgcagccgggtgcgcgaagggctggtgatatgccaggtgtcgagggtggtggcggcgggcagtgacgtgtctgtcagctcggccagcgagcgctccttttcggtgggcggtgcaagggcggtgccgtccagcgcactgcgcagggcggccatctgcgccacgcccctgacgaaatccttgagcgcagccttccactggtgcagttgcaaggcgtcggccgagcgcttgaataaggtgtagctgcgccataccaccagcgggtaggcgagtttgcccgccatgaactgtaccgccgtggggatttccttgccgaacaagcgggtcgcatggtcccacaaggtcttggcgccttcttcgaattggcttcccagcaacttgagcaacatcaatgtattttcactgaacaggtaatgcagcacattgcccgccactggcgatgcggccaggctgatatcggaggggcgatggcgactgtctttgagcaagtggcggtaagtggcctggtgcggatcttccaggtgcataagcacccagtcctgcagtgcgcccggcctttgtatctcatcgagcagggccgtttcatccgtatattccttgaacacatgttgttcgctgtacggcgcgtaaagcacccatggtccatcgccgggactctgcgggccgatcaggtacacgcccagcactttggcggtactggcgccttcggtggcgatcagttccagcggtcgaatcatcgccgtggcgccactgagtgaggcgcgggccacggcgtccggcatatcgaaaatctgttgcaccaggcttaacgcctgggtggaaaggcgttcctgcaagctgtgttcgtgggcgcactgcaacgcttgccaaggcaattggcggcaaaacaggcgtctgcgttggcgcgcatcgtcggtttttgtttcaagctggcttcgcacccgttgttgataagcacttttgaggtccagctgtcgcaccatttgtatcaccgcactggcgtccagggcttttggtaatggcttggcggtgcgtgagcgcgggcggatgtgttgcgccgtcaggtttggccagtgccgcaaggcaaagtcggtcaggttgtcgacattcacatcgagcaccgcatgggtggggatcaggatgtcatcggggttgagccccttgccgggaaagcgcgcctcaagcagcgccgtcagcgtggttaaggcatacgcgcggatgggttggatgtcatgcaggtagtcgtgctcctcgccggcgttgttgcagtactgctccagaagctcggcctggtggatttgctcctgaggcggcgccatgccgagccacaccggcagtgcctgctggttgaccatggcatcggccagcgtgatcgccctgccaaggttggtgggcggcggctgttcgatgacggcgtccaaccggtcttgcaaggcgcgggccccaaggcccatggatagcaagtgatcaacgcccgccatgaccgcgtcgttgtagctgtttactcggtcattcaaaaggtcctgatcgatacgttgcagcggcccctggcgaaaggcctgatggggctcgcgcaagcagaacggcaggttctccagcaggctcaagctgttgagcgggtgcgccaggcgttgggtgatttcatcgcgcaggtcgctgacgcaggcaaagacttcgtagcccaggcgcggggtccagagcagcgcctggcccgagcgctgcgggtcgagaccgccgcgctcagtgatgacaaaaatattggccagcggttgtggcgtatcgacggcgttcaggtccagcgtcaagccataggcatccggcaaaaaaccgttaaggccatggcgggtcaagcgcgacagactgtcgggctgaagtagcgtgtcgagaatggcctggcttgtgggcgccagggttttatccagcgacctcagctcggcttcgctgcgtaaccccaccagcatcgagtgggcgtgtttggcgtgagtcttgaccagaaactcatggggttgctggcgcatggcgtgcttggaaaacagcagcaggacgcgctcgatgacggtgttgaacgtcttgagcgtcatgcttggcaattgcacgaagacattgccttcgccccgcgtatagaacttcgtcctggacgagaagggcaccgcaggcgcctcttgggccagacgttcaatgaagtgctcaagcatgctcaatgactgcactgtcgcacgctcttcacgctcctgggcacgcgtggcgtaggtattgataaacacctcttcggctttgactgactgttgctgcagttgcagttcagcgttgagcgtgtcagcgacgatgctacgtaaggtcgggtggtgcgcgcgctccatcgccagcgcacgctcaatcgcccgcaggttctgaagctgcagccgggcgcgctcggccttgacggtcgtagggcggccattaccacgggtgaccggatgcaaggtccagcgcccgttggtctctagtgtggccagttgattgtccagcaaggcacgtacgtccagggcactgtccagcagggctgtgaggtccacttggccatcgctgcgccggtagatttccagggcgtggttaaggttgtccgtttgcttgcgcgcaatgtcttgtaccaaggtcacgaacacattgccgggtatcggccttgccgcgatggtgatcgggtccaggccgagcagcgtgtcgcgctcatccaatgagaggaagttgagccattcgtcctcgtagccttcggccttgagcatgctcagtaaccggtctttgaggtcgtcgaggttttccagcacctgtaacccgcgcgattgggtgtagaggtacgcgtggtgctcggtgatcatcaaggtgctcgctggttcaacgtaatgttgatgaggggcataaaggcgcaccttttccacgctgaggttttcggcatgggcgctgcgggcgctttggtcgctgaggaacagggcctgaagtgcgtggctttcctcggcggtaataatctcgccctggcgcttgagcaacacatcgaggcgaaacttctgcgccacgccttgagcaaaaaaatccacgcgcgaggtgccgctgtcgatatcttcattccagtaggtctgcaacaggctttccaacagcttcgagaaagtactggagctttgttcgatcaaggcctcccaacgccggtgatcttcttcctgttcggaggcagtgaagccagtggtgtcatgttttgggttcgagtattcgcgtatctgccctttgggccacctgtgacgcacataaaattgcagcagcgcttcgctcaaggtctgcgagttgacccaacgtggcgttgcttgctcagcttcgcgggttaagacattgacccgtgtgtcccgttgatccaggtgtttgaaatgggggcgggccatgacgctcagcagcgtgtcgagcatgtcaggcaaggtcggggttttttgcaggtggacgagcatggccttgacgttatccagctggcaggcctggagcatgcgtgcttgctccggcatgacttcaccttcgatgagctgagtggtcaacaccatgggcgtttcagcgcccagcgcattgcgttggtccatcgacaggtagctcagcaaaggggcgctctgcagtgggtcttccaattgctcgatcaattcgctcagcagggcagcgtggctgtcatagacctgtatgccgttatccggggtgtagagcaatgccttggcggcgtcgggtgtcgggctgatcgcgaacgcgccggcaaggggaatggggggcttgccggaaatgttgatcaggaccttttcaacacgcatggggtgatcatgccggcttgtgtcctgccgagactcgtcggtagccaggtaaaggttgtacagccaatcaaggtctttggcggtgagccccagcgtacgttcacgagcagtgggcgaggctttgccttggggtttgagaaactcagggaagaaatacgggggcgttaagcgaaccacagcctgtctccggcgtgccaggaaaagcacagggtaggcaggcgtccgtggtgcaaggcggtaaatattcagcgctgcgcacgttgacaacgcagagcgtgcgtggtgtttaatcgagggtctggatgtcccattcgttgccccttccaatcataaaaacggagcttcaaatgtctgcgcagtccccgacagttgccaccgcttgtgcctcgatccgcttcgctgaactggaggagttacttcatcaggtgttcgttcggcacggcacatcggcgcaggttgctgcgattcttgcgcacaactgcgcaagtgccgagcgtgacggtgcccacagtcacggtatttttcgcatccccggttacctttcgacgctggccagtggatgggtcaacggcaccgccgtccccagcgtgaccgatgtggcctcaggctttgtgcgcgtcgatgcgggcaatggttttgcccagccggccctggcggcggcgcgcccgttgctggtggagaaggcacgcagcgccggcatcgcgttgctggcaatccataactcccatcactttgctgccctgtggccggacgtcgagccgtttgccgaggaggggctggtggcactcagcgtggtcaacagcatgacctgcgtggtgccccacggcgcggatcgtccgttgttcggcaccaaccccatcgcgtttgcggcgccccgggccgacggtgcgccgattgtgtttgacctggccaccagcgccatcgcccatggcgacgtgcaaatcgccgcgcgcaaaggcgagcggttgtcaccgggcatgggcgtcgatagcctcgggcagccgacccaggaccctaaagccattctggaaggcggcgcactgttgccatttggcgggcacaagggttcggcactgtcgatgatggtggagttgctggcggcagcgttgacgggcggcaacttctcttttgaattcgattggacggaccacccaggtgcgcgcacgccgtggacaggccagcttctgatcgtgatcgacccgagtaaaaccgctgggcaaagcttcgcccaacgcagccaggagctggtgcggcagatgcatgcggcggggttgcgtcgattgccgggggaccgacgccatcgtacgcgggcgaagtcgcaggaaaccgggatcgaactggacgcgcaggcgttgcgcgagttgagggcgttggcggcggggtgaaacaggctgcgcggggggcgcagcctgaatggatcagttacggcgacccagcaacaggccgaccaccaggccaaagcctgcggaaatggccacggtctgccatgggtgcccaccgatgtaagtctcggtggcatccacgaccggcttgctgcgttcacgcacattggacaccgattccagggcttgcttgagtttgatggcaacctgctcgcgcagggtttcaccttcctcgcccaccagggatgcgctgcttttgagcagtttgtccgactcttcgatcaacgcgctcagttcgctgaacgcttggtccttgatttgatcttcgacagcttgggcggcggttttgcgggccattgagtgactccttgcaggtggatgtggcagtgaacaatggagtatcggggggaggcaaaagttgcagtttttttccccatgcgctcatccgaggcaaaatccggatcgggaacgttgggcctacagtgtaagatgtcacctatttgtgcagcaggtaattcaacatgagcttcaatctcgccaacaagaccctcgccgaacgcgccgagctggaagatgaaaagtcgcgcctctacgacctgtggcaaaccaacctgggcaaggccaagggcgaagccgcacgcttgttcggtgagcgcgccaagcgcaagggcaagtgggccgaatgggtacgtgccgaactcgacggcatgtcgccgccggagttttccaacatggtgcgcagtgaagtcaacaagctgatggcggcggcgaagtaaagcacgccacaatcgcttcgcgcaccttgagcagcaacgggtccagctgagcttgggtacgccagcccaactccaccgggtaatgcggcagcgccagcgggcagggcagcacgcgcaggccggtcatttgcgcaatggcgtgggccgcatgcccgggaatggttgctactgcggtgctgcctttgagcagatacggcagcgcggcaaagtggctggtggacgcgcagacgtggcggcgcaacccgtgcgccgccaagccttcatcggtaatgccgataaacccgcctgacgacaccagtacatgctcgcgtgtgacaaacccctgcaggtcgatgacctcctggcccggcgccaggctatgggggtctaccaggcaacgatagtcaccttcccccagcacctgtcggctcagccggcgctcggtaaaaccgccggcggtgatggccaggtccagcgtgcggtcgagcagggcggcggcgacgatctggctgtaggtctggcgaaagatcacccgtaacttgggcaggcgcagtgcgatggcctccatcaggcttcggccataggcaatctcgaagtcatccgacagccccagcaccaccgagcgcccctcgtagtgcaggttttgagggctgatcatcgccaggctctggcggcagcgatccaatgcctcactgatcaccggtttcaactggttggcccgcaatgtgggcgccaggccgcgtccggtgcgcacgaacaaagggtcgccgtacagctcacgcaagcgccgcaagcccgcgctgatcgccgactgcgtcacacccaggcgcagcgccgcacggctggcactggactcgtcgtgcagggcttcgaaggttttgagcaggttcaggtcaacctgggcgatattcatttggctcatatcatttagcactgaggtgggctttattcatgatcgagtctggccggagaataggcaacccctatctatcggagtgagcccgatgcctgtatcgactgtcgcagccttgcaaatcggcgccttgcctggcggcaaggctgacaccctggcgcagatcctggcctatgaggagcaaatccagcgcagtggcgcacacttggtggttatgcccgaggcgttgctgggcggctatcccaagggcgaaagctttggcacgcaattggggtatcgtctgcccgaaggccgggaagcctttgcgcggtattttgccaatgccatcgacgtaccggggccggagaccgaggcgctggccgggttgtcggcgcgtaccggtgccagcctagtgctgggcgtcatcgaacgcagtggcagtacgctgtattgcacagtgttgtatttcgaaccctcgggcggcctggtggccaagcatcgcaagctgatgccgaccggcaccgagcggctgatctggggcaagggcgacggctcgaccctgccggtgattgacaccgcggttgggcgtatcggcggcgcggtgtgctgggaaaacatgatgccgttgctgcgcaccgcgatgtacgccaagggcgtccaggtgtggtgtgcacccaccgtggacgagcgcgacatgtggcaggtgagcatgcgccatattgcccatgaagggcgttgctttgtggtcagcgcctgccaggtgcaggcatcgcctgaagccttgggtgtggaggttgccaactggccggtggaccgtccgttgattgccggcggcagcgtgatcgttggacccatgggcgatattctggcggggccgttggtgggcgaagcgggtttgttgacggcgcagatcgatactgatcagttggtgcgggcccgctacgactacgacgtagtggggcattacgccaggccggatatttttgaattggtggtcgacgagcgcgccaagccaggcgttcgctatatcactgactgaacgcaatcaacctgtgggagcaggcaagtcagctcccacatgtggttttcagccacttaccaggtggcagtgttcggtaagtccagggtgccacgctccacaaaacgcatggtgccaaacaggccacccgccaatttgccgcgcagcacgtagggcaggttgttcaggctttgggtctggctaaggcccagggtctggcgcaacaccgaaaacgccgaaacgctgaccggcaccatcagcacggtctcggagaagcgtgggatgctgccagcctgatcgctgacgcctgcggccagtggccggccattgacctccaggtccagggccacgccgttgtagtcgattgccgcttcattgggattttgcacccgcagtttcacggcaaagcgtacttccaggtcctggctttggagcggctcgatgcctactacattgatgttcaccgggtcgcggttggggaacagtgcgcaggcgctcaaggtcagcagcaacagcgatagaaccatgagcttgcgcataaagaaatgctcctactttggggtgacgtccgggtcctgcatgaccttgagggtagaggactccggctcgaattcatcttcttccagctctatgaactcttcgggcaggaaaatgttcagcaggattgcacagaatgcgcccacggtgatcggcgattcgaagatgttgtgcagcgccttgggcagctcgcgcagcacttccggcacggcggcgacgcccaggcccatgcctagggaaatcgccacgatcagcacattgcgccgatgcaggcctgcttcggcgaggattttgatcccagccacggccacggtgccgaacatgatcagggtcgcgccgcccagtaccggcttgggcatcagttgcaacaccgcgccgatcatcgggaacagccccagcagcaccagcaggccggcgatgaagtaggccacgtagcggctggccacgccggtcaattgaatcacgccgttgttctgggcgaaggtcaccatcggcaggctgttgaaggtggccgccatcgcagagttgagaccgtcggccagcaggccagacttgatacgcttgatatacagtgggcccttgaccggttgctgggaaatcatcgagttggcggtcaggtcaccggccgcttccaggggcgaaatcaggaagattaccgccaccgggataaacgccacccagtcgaacgagaaaccgtacttgaacggcacgggcacgctgatcagcggcacctggggcagagcggccatgtcgacgcggcccagcaaccacgcgactacaaagcccagggtcaaaccgatcacgatcgaacccaggcgcaggaacgggttgttgaagcggttgagcaccacgatggtcagcagcaccaacgccgccaggcccatgttgcccgccgcgccgaggtcgctggcgccatagccgccggccatgtcggtgaccgccaccttgatcagcgacaagcccatcaaggtgatgatggtgccggtcaccaccggggtgatcagtttgcgcagcttgccgatgaactggctgagcaccacttcgataaacgctgcgaaaaagcagatgccaaagattgtcgagagaatctcatcggtgccgccgccccgggccttgaccatgaagcctgcgctcaaaatcacgctgataaaggaaaagctggtgccttgcaggcacaacagccccgagcccaccggcccgaaggtgcgtgcctgtacaaaggtgccaagccccgacacgaacagcgccatgctcaccaggtacggcacttcgctttccagccccagtacgccgcccacgatcagcgtgggcgtgatgatgccgacaaaactcgccaacacatgctgcaacgcggcaaaaatcgcggcggtgaagtgcgggcggtcttcgaggccgtacataaggtcggatttatagcgcgggcggggggcttgagcgtcagacaaaatgatggctcgggtcagaaaatggaggcgcaggatgccagaaagtgccaggcgcctgaagtgtaaaaaaatatttataaagaccctgcgctaaagccatggcccagccgatatcaagcataggcccacactacaacgacaacagtggtgaccaaggtctgggcagcgcgttgacgctgacggatcgtttcgcggcaaggacgctcgcaaacactacttctgagagcagccctatgtccctccgtcacctgaatattgcccctcgcgcgtttatcggttttgccttcattgcggttctggtggtgctgctgggcgtgtttgcggtcaaccgtatgacgcaaatgcgccaagcctcccaggacatgagcgccaaccaactgcccagcatgactcacctgggcaccatcaccgaaaacgtgctgcgcatgcgcatcctgtcgtttcgcgtgctggtcaaccgcgagcctgccgccttgcaggaagccgaaacccgtattggcgtattggctgacaaggtcaagaccgcgcaggccaaatacgccacgctgcctgccggcccggaggaggcagcgctatacaagacctttggcgtgaccctggataattacctcaaggcccaggctgagatggtggcattgtccaaacaaggcaaggtcgatgagatgcgcgcactgatcaacagccgcatcaaggaaggcaccgatcagatgggcgagcaattgaacaagctgatcgccatcaatgcggccgacgccaagcaagccgacgtagatgccgggcaaagctacgagggcgcgatcaccggtgtggtggcggtctctatagtggcggcgttgctcaccgtgctgctggcctggttgctgactcgcagcatcgtgaccccgctgcgcaaggccgtggaagtggctgaaaccattgccgccggcaacctcagcaaaaccatcgaggacgatggcaaggacgaaccggcgcggttgctcagtgcgctgtcgaccatgcaagccagcctgcgccagaccatccagcacatcgccggctcggccacgcaactggcttcggcggcggaagagttgagcgcggtcaccgaggaagcgtcccgtggcctgcaacagcagaacaatgaaatcgaccaggccgccacggctgtcaatgagatgacggcggcagtggaggaggtggcgcgtaacgcggtttccacctccgaggcgtccgggcagtccaaccaggcggcgcgggaaggccgtgatcgggtgatggaaaccgtcggcgcgatccagaccatgacccaggacgtacagaatacctccgcgatgattgaaggcttggccgctcagggccgggatatcggcaaggtgctggatgtgatccgcgcgattgccgagcaaaccaacctgctggcgctcaacgcggcgattgaagccgcccgtgccggcgaggccggacgcggctttgcggtggtcgccgatgaagtgcgcgccctggcccatcgcaccgcgcagtcgacccaggaaatcgagaaaatggtcgccggcatccagaacggcaccggtgaggcggtgcagtccatgcaacaaagcaaccagcgcagccagaccaccctggaaatggcacgcgcagccggcgcctcactggaacagatcacggcatccatcagtctgatcaacgaacgcaacctggtgattgccagcgcgtcggaagaacaggcccaggtctcccgcgaggtggaccgcaacctggtcaacatccgtgacctggccacccagtcggcggcgggcgccaaccagaccagcgcggccagccatgaactgtcgaggctggcggtggacttgaatgggatggtggccaggttcgtcgtctaacagctgccacaaaaccctgtgggagctggcttgcctgcgatagcaaacgaacagtcagcacatcatgggttggcttatcgttatcgcagcataggtatctgtagcgctcaacggtaaccacgatgcgaagcgagcagctcttgatcttgcttttgatctgcttttgatctgcttttgatcttaggcgtcccgtcaaaccacgctggccggaattcgacagggatttggggggtaaaccggcagggatgccggcggattacgggcacaccgagcctaagcgaggtgccgagtggtggggcaagagcgtttttgcttactttgccgcttttgcaaagtgagccgccgtcagggcggaaccctaagcggccgttaccgcaggaatggatatgtacacaatccaactgtgttgaccgccaggccgccttcgcgagcaagcccgcacacacagttggatcgtggtttgtctggtagataggcgttggctttcacgccgtcatcgcaggcaagccagctcccacatttgctcttgtgttgtgtcagcgcccccatgcccctggattcaccaggtttaccggcttttcgccagccagtgccgccagcagattatccaccgcacacttagccatcgcctcccgcgtctcatgagtggccgagccgatatgcggcgtagccaccacattattcaaccgcaacaacggcgacgcatgatccagcggctctttctcaaacacatccaaccccgccgcgcggatagtgcgttgctgcaacgcttgcaccagcgccgcctcatccaccaccttgcctcgcgagatattgataaaaatagtctctggccccatcagcgcgaattcctcggcgccaatcaacttctcggtttcagccgtcaacggtaatgtcaggcagacaaaatccgcctctttaagcaagccctgcaagctgcggtactgcgcgccaaagcgtgcctcaaccgccggcttgggcgagtggctgtggtagatcaccggcatgccgaagccaaaatgcccacgctgggccagggcttcgccgatgcggcccatgccgatgatgcccagggtcttgccatgtacatcgctgccaaaatgcgccgggccgatgtttttgttccactggccggcacgcaccatgtcagccagttccaccacgcgccgcgcggtggccaggatcagcgcaaaaccggtgtcggcggtggtttcggtaagcacatccggagtgttgctcagcaggatgccgcgctcggtcaggtagtcgatatcgtagttgtcgacgcccaccgagacgctggccacggcttccagctggggcgccaggtcgagtagccgggcgtccaggcgcaggcttgcccccagcaggccgtgggcggtaggcagggcatcgcgcagcttggccaggccggtttcatccagtgcgtcaatcagcgtgacctcgacctgctcatgcagacgagccatgagcggcgcggagagttttttgtacagcacgacagactttttcatgaggtttttaccttcaattccagggttggcgccggcgagcggtcactggcgccgggcttgaggaaaatcgtcagcaccacggaaagcagcagcgcgccgctcatcagcagataagaagcgccgggcgagccggtgctgctgttgaggtaacccaccaggtacgagccgccgaacgagcccagggcgcccatgctgttgatcagtgccatggcgccaccggcgacgttggctgggaggatttccgggacgatggcgaaaaacgggccgtagggtgcatacatgcacgccccggcgatcaccagcagggtgtaggaccaccagaagtgttcggcgcccagcacgtaggacgcgtagaaggcaatcgacgcaatcaacagcggcggccagacaaaacgcttacgtttctgcagcttgtccgagccccaggacaccacgagcatgccgatcaccgccgccaggtagggcagcgccgagagccagccggcttcgaccatgtccatctgcaaaccggccttgaggatcgacggcaaccacagcacgaaaccgtacacgccaatgctccagcaaaagaactgcagcgccagaatgatcaccttgggcgaacggaacgcttcggcgtagttcttcacggccttgattcccacctgctcggcggcgagggcggtttccaggctgtgcttttcggcgtcgctcagccacttggcatccttgggacgctcatcggccagcttccaccagataaacgcccacaatactgccggcaggccctcgatgataaacatccagcgccagctgaaatgctgcaccaggtagcccgacaccaccgacatccacagcatggtcaccgggttgccgaggatcaggaaggtgttggcccgcgagcgttcggcccgggtgaaccagtggcacaggtacaccagcatggccggcatcacggcggcctcgaccaccccgagcatgaagcggatgacgatcagcatgtaggcgttggacaccacgccggtcagcgtggccaagccgccccagaggatcaggctgacgaagatcagtttcttgacgctgcgcttttgcgcgtagatcgcgcccggcacctggaagaaaaagtagccaaggaaaaacagcgcgccgagcagcgaagacatgcccggcgtgatcatcaagtcttcggccatgccggacgcggcggcgaagccgtagttggcgcgatccaggtaggccaggctgtaggtgataaacacgataggcatgatgtaccaccagcgacgggtggcgagtttcacggtttccatggggttgctcctgagcttgttgtagttgtggcaacaggtaatgggtcacgcaacggatcgggtgggtaattcagcacgggtcggcaaaccctccatatcgccacggctctgcacggcgcggctgccgatccagttgccgcgttgtacggcctcggggaagcttgagttttccagcagggcgctgatcatgcccaccgcaaagccatcgccggcgcccacggtatccacgactttttccaccttgactgcggcgacaaaaccctggtccatctgggtgcggtaataggcaccttccgggccgagtttgattgccacggcttcggcgccctggtcgagatagaacgcagcgatatccgccggatcctcgtagccggtgagcaagcggccttcacccaggcccggcaagacccagtcagcaagagcggccagggcattgatttcgcggatcatctgcgcttggctggcccaaagcgaagggcgcaggttcgggtcgaatgacacgctgcgtccggcgttgcgcatctgcttcatcagttcaaaggcgagttcacgggtggcatcggacaatgccggtggaatccctgtagcgtgcagatggcgcgcttgcagcagcgtggggctgatgtcggcgatggacaaatggctggccgccgagcctctgcgaaagtactccacttgaggatctgcgccggcctcttcgcgcgacttgagttgaaacccggtggggtgcagcgggtcgacggccacatgacggcaatcaatcccttccttggtcagcgtgtcgactacaaaacgcccgagggagtcgttacccacgcggctcagccaggccacattgaaccccaggcgcgacaggccgatggcgacgttgctgtcggcgccggcaatgcgtttgtgaaactgcccgacctgggccaggtcgccggtctgttcggcgacaaacatcgccatggtttcgccaaacgagaggatatcgatctcagacatgggcgttctccacatggggttggccaaggcgggcaagggtcgcgacctgttgcgcggtgacttcgatcaggtcatcgccctgcaacggaaattccaccgcccgggtaataccttgagtcatgtgtttgagcagttgttcccacagatgcaggtcggtggcgcccggcggcaaggccaccagcttgccatcggcgcgacgggccacggccttgcagtgcaggtaatccacatgccggcccagcaaccgcgcagcggtgagcgcggattggtcttgccactgccagttgccgatgtcgaaggtcattttcaccggcaggcccaggcgttcgacttcggtaaaaaaccgttgcatcggttcaatgcgcccgccgtgcagggtctggtcgttttccaccagcagcttgaccgggtggcggttgagcagggcgtgcaggctttccagatcgttggtgtcggtgaagtaaccgagagacactttcaaccagcccgaaccaaaggcctgggcgcggtccagggtcgcggccagctcggcattgggctgggcacggccggcgacccacagctccaagggcgaggaaaagacagattccaggccttgttctgcagcggccagggccaactcagccggttgctcggtggtgagcagttcttcacgccattcaatgcgctgggcaccggcggcgctcagcagcgcgacaaaactcaattggccctgctggcgaaccaggtcggcgccgtagctggaaaggctgatggagacggggtatttatgcattgttgtttacctctgaaaccggtttcattttcatgcgcagaacaaaatgtgggagcgggcttgctcgcgaatgcggtgtgtcagtcagcttggaagcggctgacacaccgcattcgcgagcaagcccgctcccacaggggattgagtcgagccacggataatcagctcgggtaaaaaatccagggtgcgggtgggggcggtatcgccgcgcaggcgcttgagcaaacagtcgaaggcgctggcgccaatcgcttgcgtcggttgggcgagggcggtgatgccgttgcccaccagcgggtaccagtccaggtcatccagggcgatcaagcccacctcgccgaacaggtcacagcccagggccttgagtgcacgggtgcaggccagtgctgccacgccgttggcgcaaaacagtgccttggggccggggttggcgagaaaggtttgcagccggttttccagttcgccatccagttcaacgacggcgcctttcaacgccgggcgcttagcaatctcgatgttgaaactcgccaggcgttccaggcgtgaactggtgccgtcggtggtttcgctcaccagcagcacctcgcggtaaccctgctgttccagatggtccatcgccatacgcactgccgccgggttatccagccccaccaggtcgctgtgcaagggctcgaccttgcggtccaccagcaccaggggcatttcccgttgcagttccagcagttggtcgaggtgatgtcccagggtgttcacgatcaagccttcgatgttgtacgagcgcagcgctgccaggtgttggcgctcctgctcgtcatcgcggtcggtgttgcataccaccaggctgtagccgtgctggcggcacgcggtttcgacgccgtgcatcaccgcaatggagtaggggttgcggatatccgccaccagcatgccgatcaggcgcgtgcgcccacgcttgaggccacgggccatctggttggggcgataaccgagttcgtcgatggcctgttcgatgcgcagcgcgatggcgtccgagagcagggcgcggtcatcgccgataaagcgcgacacgctggccttggacacgccggcgcgcttggcgacgtcgagcatggtcacgcggctgcgctgggcagcggaaaatgaagtcacggtaaagcctttcttattggagtttggggttgcgctgaaaccggtttcagggaacaccaagtccaagaagccgtcaagctaatcttcgctatgggcacgcagcaacgcttggataaaaccgacgaatgggacccgcaacctgttaattctgacagttcccaaaaagaaggggctggcgtttactttctcacaacgtgatgggtggaagcgctccaggaactcatcatcgaaagaggaaagagtatgtccatttcaacattgactcatatttctggagcgcgcattggcggcgtacttgcgctgggacccatggacattccgggtgtcgaccctctcgaccccaacggtcttgtaccggtttcactgacgcttgcgcccctattggtcaggatacctatgtggctcccggccccagagccgctggataccccccacagagtgcaacttctctggttgcgagacggtattgaaagacaggccgacctgaaactgattgatgctccaccgccgccgctgcctgcatttgtgcaaatgcatgtgccattggccatgcttcgagagcgttcaggctcggtggagctttattatcgtgtgacagactcggaggggcagaccagcgagcttgatccgaaggtcacgttaactattgatttggaatcaccagaactgctcaggccggatgaccaactcagttttgtgagtccgcccaccacgggtgtcgatgaggcctacttggcgggcaatgacccggtgcgcttcaatgttccgccttatcgagggcgagagcgcaatgatcgcattgaaatggttctatccaacagcccgaacccagctgccgctgcgcctgacggtgactatgcactggtaaacacttcggacccgctgatctgcgagttaccggctgccggatttcgtcgcctgaacaacgggcaagcctacatcttttaccaagtattcgacgaggctggtaatttcagtacgcgtagcgccggcttaccctttgtgttggacctgatcgcgggcccaggcgtacctctacctgcgcctactgtcatgccgccagcctatgacgacactctcatcaagcgagatgacgcgcgagctggagtggtggtgctggttcccccctatgccaattgggccgcgggtgatcaatgtcgggtttattggaacgaacggccggtgccggatgtcccggtgtcagatggcgtcgaaacacaggtacccattccttggtccatcctgagggggccattgcctgtcttggtggcagaagagatccggatacgttacgagattatccgtggtctggtgagctacccctcatttgggcggcgtatcaggcaggacttcaccgtggcggggcaagaccatgcgggagcgcccgcattgcttaaccctactttgccgttggctgaagtgcgcgggttggtgtcagatgaggccaatttggttgaccttagagacaaggatgttggcgctcgtgcccgtgtgtttctctatgacgacccccagccaggccaagtgttgcggttcttctggaatggcatcgggccggtggcgaccaagactgtccaagtcggggaggtcgctggccaactggtattctccagcgttattccttggggcgtcatggagggcatcattaactcgtcgttgcctgtgcattacaccaccgataacggggttaaccagcaacagtccagaaatactgaagttgatgtgaatacggggccgctgctcagctttcctactccggttattcagcacacgcttgtcggtggcacgggtacgtttctgacgtgttgctcatccccggagatatttgcaggtgttcgttggaaagtcgtttcccatggcgattttcaagtgaacgacgaagtgcgattttttacccatggctacaacaacaatggttgggtggatcccattgtgcaagacagtaggtttactcaaagcaagacctttgatacgccagcggatttagtcaatgggttggattttacggtcatgcccttcgatccagtggtgtattcgttgcgccttcagagtactgcggtcgcctggtatgaggtgtggcgcggtagaagcaaaatcggagagtcgatcctgcggcgtttcagggttgatctggcttatcccgcgggtgggttctgccaggcaggcgatgtcgttcattgcacaagtgacggtgtgccctcgctgataagaaatgattgtgtcgattcaaactaaattagtactcgaaacgtgcggcgagtaagcgatggttttaatggctgaagcggtgtgaaaacctaatagggttaaacgaatagtttattgctgttgttcgtcgcccaccttgtgaatgttggaggttaatgatggacaaaaagacgcgagactattttgccaagctcaatccagatggagagtcaccgccggctatcttgtcggagttgccgccggcagaattcgatattgttcctggttacccagggctaatttatcgggagcaggcgttggccgagcaaatggagttgcgtatacctcgctgggaagattacagctccgacccggcacttcctgatattgtttatgtgtttataaagccggtagatgacgctgagtatgagggcccgttcctcacgttcgaacacaactttgacgccactttgccagaattgtttgtcaccaccaatatcgcccgaggccgacgtccgcctggccactgggatattaagtatgaggtatatatccgccgtgttccgaacttaagtgaatcattttcgacgcggctgattgtcgacactgaagcaccctatgcaaaatctccaatcctttttccgcccccgcctattgtcccggcaggcgtgacgttgcctatcgacgaagccgatttcccggccgcccccaatgatcggttgtttttgtcaattccggactatgttgccgatggacgtgagccgggcgacacgatacgagcgttctacaacgattcagacacgccctatgccgttgacacagcctccagcgacgtggattggcctgtgacggacttgaggttcccattgcccaagagtgttgtcgaggcaggacctgatggttacgttgcgattcgatatcagctattggacgcagctcgcaatcccagtcagttgtcctcggctttgcggttggatgtagccttgctgtcggcaccgaccaacctgaaacaacccttgatcggcagggcattccctggagataacctgtttgaccgagtcgatgcgtccattgaccagggaatgattgtgcgcatctccgagtatcagcattttgagcggggaaatgacggtgatatttttgacctgacactttcgaccagcattgcgactgaaaccattcccggcacttcgttgggcagtacaagctttccagtgcctatcactgttcccattcatattctgcaaagcctgtatggcgcgtcgacgggcgacttgccgctgacggtcacttatgttgtcagacgtcggtccgtcacttaccccgcggcgccgtcgacggtcatcaacttgaatttgcacgtagtcggccccgcccctaccaatcctccagacctgacaaacgccgacctctaccccgttgttatcaagggggtagacgctggtggggtggaagggaatgacaacgaactcttgcctgcacacgccaatcggcccgccaatgcccacatcacgttgtgggatgcaagcccgaccccggacgccgaggactttgtcattcggctttactacgagggagacctcgtcgccactcggccaattacggggggcgtggcaggcgatccggtcactccgccgctacagattccatgggcgattatcgccaagcatggcaacgcgccgcctctgaaacaggtgtattacaccatcggtacggcaaccggtacgaatcggcaggagtctgaggtcacgtcggttgatgtacaggccaatgttcagtcccttgccatgccagaggtccgaaacctagagttgattggcggtcctccaggcgtgatcaactgcaataccgtcaggcctttgaatgcgaatgggaatatcacggtttttattccgccgtcgcgcttcttcgaggagttcatggtggtgcgtgtggactggaagggctatagcgacaataccggtacgactgaggtgcccgccgcagcggggtttacaaactccccggcgttgactccgcttatgatttcgcaggggtttgaagtgaccctggggcctttctcaaccattatgaaattgattcagcctcaccaaggcacacgtctcatgggtgcggcaaggatcaattacaccattcaattgccaactgggcctttgacatcgagtgacgctctgcatttgtcacgctcgatcaaatccggcgcctctcccacctactgcgacaacacgccggtacccgcggcgccctgaatggttgcggcaacggccagggagcagcagctgctccctggatccacatatattctcaccctatttgtcgatattgaaactgtcgacttaagacttatcctacataaacagggaacgcctctgggtagtttgggcaccgcttgattggcatggttccgcgcttttggtaccggccaatttcttcaatcggaaatgccaaacccagagggtggtcctgatgtcgtcaatattcaattttaaactcaacccgttaagcttcgctttgaaggcaaacgcggtctctttagtggtgctgatgtcgggtatagccgaagcgcgagtggttaccgggccgaatgaaaccgtccggcctggccctccgcctgacagcttcgaattgaagcccggctcaggcctcaccgtggaaggtgccactaccaaacaaatccgtgcacagtctgcgaacttgaccgttaacccaggcagcaaaacccaagacatcacggcattcaattcgaacgtgaatattgatggcgccgagatcactgcgcgggcgacacaaccggcagcagtgttcatgagtggcgggacgctgtcactcaagaacagcacacttacccacactaatggcaccggcctggtcgtttctcgtccgattggcagtgacgagggggcgattgcctcggtattcaacagcagcatcaccggcaccacgcgtggcgtcagtgtaggtggtaacagcgcgttggcgctctaccaaaccgacgttgcaggtacgggcgaaaatggcgtgggcctgtatctgttcggtcaagccattgcgatcgatagctccatcaccggtgagctcaatggcgtgcggatggatatggaccgcagccccgaggtgccagctgcattgatacttgatggctcatacgtagaagggaaagcgggcgcagccattctggtcgaaagctcgaaggcgggtacaccggctaatgcaactatagatgtgcgcaacggtgccaccctcaagggcggcaacggcaacatcctcgaagttaccggcggctccttcgccaacatgaatgtcgacggcagtaccttgttcggtgacgtcgtggtcgaggagggcagcaccgccacgttgcagctcaacaacggctcgtggttgaccggccagctgaaaaacgtggccgagttaagcgtgaacaacgcctcccactgggcactggtgggtgacagcgaagtcggcgacctgaaaatggcgggtggcagcgtgcattttggtgggcctaatgagttctaccggttggatgtcgacagcctgtcgggcgatggcacgttcgtgatgcacacggactttggcagcggccagaccgacttgctcgccgttaatggcatcgccgaaggtaaccacagcctgttgctggcggccacggggtcagagttggcgacggccgagccgatacgcgtggtcagcaccgagggcggggatgcgcagtttgccctggtcggtggatcggttgacgcaggtgcctacagctacgggctcaagcaggaagataccgactggtacctggaccctaaccgtcgcggcaccagcaacagcaccaaagcggtaatggcgttgttcaacacctcgcccacggtgttgtacggcgagatgaccttgttgcgtacccgcatgggtgagctgcgcttcagccaaggcaacaacgaaggtttctggatgcgtggctacggcaacaagtacgaggtcagcggcaatcaggatggtggtggctacacgcagaaccagcgcggctttaccttgggtatcgacacgccgctgtacggtggcgacgggcagtgggtagccggtgtgatggccggtcacagtacgtccgatatcgacctcaaccgttccggtggcggtacggtcgacagctactacgtgggcggttatgccacgtggctcgatgacgagagcggcctgtatttcgacggtgtggtcaagctcaaccgcttgcataacgaagtcaacgtgagcatgagcgacggcaagaaagccaagggcaactacacccagaacgccgtgggggcttcggtggaagtgggtcggcatatcaagctcgatgacggttacttcgttgaaccctacgggcaactcaacgcggcgatcacccaggcccagagttacgatttggacaatggcctgcacgccaaaggtgaccgttcggcctcggtcgtgggcaaggcaggcgtgacggtgggcaagagtatccagctggacagcggtggtgtgttgcaaccgtacttgcgtactgcgttggcccatgagttcaatcacaacaacaaggtcacggtaaacggcgagcgcttcaacaacgatgtattcggttcgcgcattgaaatggccggtggtgtggcgatgtcggtgactcagaacgtcaagctgcatgcggacctcgagcatacacgtggtaaaaccgtcgaccagccatggggtgtcaacttcggcgtgcgttacgacttttgattcattcatccgcccgaacaggggaagctaggcttcccctttttttcgccttcagatcagcacactcagccaggctgagcccaacagcagcaaggccatgactcggttgaatgcgcgtacggtcctgggggagcgcaagaggcggctagacccggcacccaataaggcccaggcgccgaggcagggcaaggcgatcaggaaaaacaccagggacaggtacaccacctggcgctgcccaccctggccagcgaacacactgacctccgccagtgccatcatccaggttttggggttgatcaattgcagggccgcggcgcccaacaggcccaagggtttttgcgtgtcatcggcattgatggcctgggctggcgccctgaagatctgccaggccaggtaactcagccaagccacaccggcccactgcatcgccgtttgcacgttgggcagttgcaccaatgactgacccacaccgcaacccaccagcagcacaatccccgatgccccaacgcaagcccccatgatgattggcagcgcagccttgaaaccgtaacgggcgctgttgctgagcaccaggatattggtcgggccgggggtgatggaggcgacaaaggcgaacagcatgaaaggcacgaaggtggacagcatagcgggggactccagtgaactcttcaaggaagtccatctttacaagcctgcgggttaccggtctggaagatttgtgcggcgcttgcggtacgcggccggcgtcaggccataagcacgcatgaaccagcggcccaaatgactttgatcggcaaaacccagggccatcgccacgtctgccggttggtcgcccttggccaataaataccgggcccgtgccagacgcagttgcaccagatacgcgtggggcggcaggccgaaggcgctcttgaaggcgcggctcaggcgaaagcggtcgacgccgcaggccagtgcgagttcatccatgcccacgtcctgatgcagatgggcgtgcaagtattcccgcgccttgtgcgccacctgcggcaaacgtgggtcatcgcggtagcgcatgcgccagtagagctggccggtgaggcgttccagtaactgatccagcgcgctttgccgcacgatccgcaattcaccgtgatgcaagctttgaaacgcgtggcttgtggccagagccaggcgcggatcgatggccaaggtgctggcgaaactcagttgatgatgggcgggtgcctcctcaaagacactggaaatttcccgctccagccactgtggatcgaggtagagcatgcggtaagtgaagccgtcgaccgtcggggcattgccgtcgtggagttccccaggctccagcaggaacacctgccccggcacgctgtcatggcgcatgcgccggcagttgaattgctgcacgccttgttcggtcacgcctactagatagctgtcgtgccaatgggggtcatacgcatggccttcgaaatgcgcgcgcagggtctcgatgccggtgtcggcgtcctgggacaggtcgatccaattgcgcgcgggcatacaacaccgaggttaaaagtgaagggctattagcggcagacgccgggtgggcgtctagaaggtttgtgcagtctagccaaacaacccggcggcgatgttgatcgaaaaaccgagaatggcggtgttgaataaaaaaccgatcaacgactgccccagtaccaccttgcgcaggccacgggtggcgacgcccacatccgaggtttgtaccgcgacgccgatggtgaaggagaagtacagaaagtcccagtagttgggggtgagcaagccttcggcaaaacgcaaggcgggttccttgcctggccaggtgtaatagagcctggcgtagtgaacgctgaaaatcaccccgatcagcagccaggagccgattaccgtcagcccggtaaaaccgtagtgcagcagacgctcggaagccgccaggtccttgctgcccaccagttcgaaggtgatggtggccaggctggcgatggcggcgatgcacaccatgaacagcaccaggccggcgttttcatcttcgacttcggcgatgcgcttgacgtcctcggccttggcgcgaatggtcagccacagcatcaaaacaaggtaggtccagaccccggcgttccagccgatgaggattttgctggcgagggtgtcggccggtaccagcaggccgacggccaggcccagtacggcggctgatgagaggcgagggtgggtgcgggcgaggaagggcatggtggctcacaaagaactatgtgtgagcaccatagcttattcgggtgtacctgatcatgaatgcactcaataaccctgtgtgggcttgcgtgggagcgggcttgctcgcgaaggcggcctgacagtcaacacagttggaccgtgtacatatccattcctgcagtaacggccacttagggttccgccctgacggcgtcttacttttgaacagcgcaaaagtaagcaaaacgctcttgccccaccacttggcacctcgcctaggctcggtgtgccctcactccggcttgaatccgtgggccgccgtcatgggccatccttggcccaggacggctaacccggcgtcctgccgggttacccacgaattcaagcctgcgttcggccagcgtggtttgacggggcgcctaagatcaaaagcagatcaagagcaagatcaagagcggctcgcttcgcatcgtggttaccgtccacagctacaacttgcaagccaccacggttggctgcggcgttgatcagtttggtttatggcgcttgcgcaccagctttatcaccaccacaaaaaacactggcacaaacaccaccgccaatgtcgccgtgatcatcccgccaatcacaccggtgccaatcgcctgttggctggccgagctggccccggtggcaattgccaagggcaccacgccgaggataaacgccagggacgtcatgatgatcggccgcaaccgcaaacgcgccgccttcaaggtggcatcgatcaagtcctcgccctggtcatacaggtccttggcgaactcgatgatcaggatcgcgttcttcgccgacaggccgatgatggtgatcaagccaaccttgaagaacacgtcgttgggcatcccgcgcaagctcacggccaacactgcgcccagcacgccaagcggcaccaccagcaacaccgaggtggggatcgaccagctttcatacagtgcggccaggcacaggaacacgatcagcaacgacaggcccaacagcagcggtgcctgggagccggataagcgctcctgcaacgacaaacccgtccattcctggcccagcccggcaggcaactggctgaccaaacgctggatttcgttcatggcctcgccggtgctgtgccccggcgccgcttcaccgctgatggcgatggccgggtagccgttgtaacgggtcaactgcgtcgggccttgggtccacttggcttggacaaaggctgacagcggcaccatcttcccagcgttgttgcgcacgtggatcttcatcaggtcggccacctggctgcgttggtcgccttcggcctgcaccaccacgcgctgcatgcggccctggttggggaagtcgttgatatatgccgaaccgatcgcggaggacagcacgttgcccacgtcggcaaacgaaacgcccaaggcgttggcctgcttgcggtcgacttccagctgcacttgcggcgcttcggccagggcgctttcgcgcacgttggccaggatcgggcttttcgctgcagcgtccagcaattcggtacgggcggccatcaacccggcgtggccgacgccaccgcggtcctgcaaacggaactcaaaaccactggatgtgcccagtccgtcgaccggtggcggcaggactgcgtaggcaatcgcgtccttgagttcgctgaaggccatgttggcgcgatcggcaatcgaggcagcggagtcatcactgccacgttccgaccagtccttgagcgtggtaaacgccagcgccgcgttctgcccggaaccggaaaaactgaagcccatgatcatggtggtatcacccacccctggctcgcctgcgttgtgtgcctcgatctgctcggccacctgcaccgtacgattcttgctggcccccggcggcaactggatatccgtgatggtgtagccctggtcttccaccggcaggaacgaggagggcaggcggctgaacaacaggcccatgcctaccagcaataccaggtagatcagcaagtagcggccgctgcgcttgagggcataggccacccacccttcgtagcggtgggtgagttggtcaaagcgctggttgaaccagccgaagaaaccacctttggcatggtgctcgcccttgccaatcggcttgagcaaggtggcgcacagggccggggtcaaggtcagggccaggaacgccgagaacaggatcgaggtggccatcgacagcgagaattgttggtagatcacccctacagaacctggcatgaacgccatcggcaggaacaccgccaccagcaccagggtgataccgatgatggccccggtgatctggcccatggctttcttcgtcgcgtccttgggcgacaggccctcggtggccatgatccgctcgacgttttccaccaccacgatcgcatcgtccaccaggataccgatggccagcaccatgccgaacatggtcagcacgttgatcgagaaacccagcagcaacatggtggcgaaagtgcccatcagcgcaatcggcaccaccagcgtaggaatcaaggtgtagcgcacgttctgcaggaacaggaacatcaccgcaaacaccagcgccatggcctccagcagggtgtagaccacctttgtgatcgagaccttcacgaagggcgaggtgtcgtaggggatcttgtattccacattggcggggaagtagcgcgacaactcgtccattttcgcccgcaccagcgttgcggtgctcaaggcattagcgccgggcgacagctgcacgctgacggcggtggacggcttgccgttcaggcgggtggaaaactggtactcctggctgccgacttccacccgtgccacatcgccgatgcgcacggtggagccgtcggggttggccttgagcacgatgtcggcgaattcggccggggtggacagttgccccttgaccagcaccgccgcggtgatttcctgggtgtgagtacccggcagatcaccgatgctgcccgctgagacctgggcgttctgggcactgatcgcggcgttgacgtcggccggcgtgaggttgaaaccgatcagcttctgcgggtcaatccagatacgcatggcgcgttcggccccgtacaactgggccttgccgacgccgtccaggcgcttgagctcgttcattacgttgcgcgccaggtaatcgctgagcgcgacgtcatcgagcttgccgtcgttggaggtcaatgtgaccagcagcaggaagccggcggagactttttccacctgcaagccttgctgagtcacggcctggggcaggcgcgattccacggccttgaggcgattttgcacatccacctgggccatttccgggttggtgcccggttggaacgtggcggtaatggtcgccgaacccaggctgctctgggattcgaaatacagcaggtgatcggcgccgttgagctcttgctcgatcaggctgaccacgctctcatccagggtctgggccgaggcaccggggtacaccgcgtagatttccaccttgggtggcgcgacgttggggtattgcgccaccggcaattgcgggatcgccaggaagcccgccagcaggataaacagggccaccacccaggcgaagatcgggcggtcaataaagaactgcggcatgacgggttattcctttacgagcgggctgtcgtccacttcaactttttcaccggggcgcgcatgttgcaggccctcgacgatgatgcggtcgccgggcttgaggccactggtgacgatccagcggttgtcgatcaccgcacccaactccaccggttgctggctgacggtctgctcggcatccagcaacaacaccatcgggataccggcgctgtcacgggtaatggcgcgttgcggcacgctgaggccttgcttgtcgacggcctgttccacgcgaacccgcacaaagctgcccggcagcaggtcgaggtccgggttggggaactcgctgcgcaggatgatctgcccggtgccggggtcgacgctgatgtcagcgaagagcaatttacccggcaacgggtactggctgccgtcgtcctggatcaaggtggccttggcctggtcctggccgacctgcttcaggctgccggcacgaaacgcacgacgcaggtcgttcagctcacgagtggactgggtgaggtcggcgtggatcgggtccagttgctggataatcgccagcggcgtcgcctcgttctggcccaccagtgcgccttcggtcaccagggcgcggccaatgcgcccggaaatcggtgcggtcacggtggcatagcccaaattcagcttggcacgctcgacggcggctttgttggcggcgacttcggcgttggtctggcgcaaggcggcgcgggcgttgtcgtattcctggccgctgatggcattgccttccaccagttggctgtagcgctgttcttgcaggcgcgcctggaacgcattggcctcggccttgctcaggttggcctgggcactgtccaggtcggccttgaacggcgccgggtcaatacggaacaacacgtcgccttgttttacatcgtgaccttcgttgaacacccgctgcatgaccaccccggcgacccgcgcgcggacttcggcgatacgcggtgcggcgatgcgcccgctcagttcgctggtaatagagaggggcttggcctgcagggtttcgatccgcactttggccaggggcatttgtggcgcctcgtctgccgactgaccacacgcgctcagcgccagtgtgagggccaacaggcaaaacggcgcaaatagattcttcgacatgctcttatcccaatattgactggcgcatcctaggggcacctgcgccgtggtgctgtgaagctgtgtagcgggtctgtgaagaagtgtaaggtacggcgcgcagggcgccgggggcgtatatccttgcacaatcctgcaacacaccaacaaaccgcattatttggaaacaccatgcccaacatcctcctggtggaagacgacgccgcactctccgagctgattgccagctacctggagcgcaatggctaccacgtcagcgtgctcagccgtggcgaccatgtccgtgaacgcgcccgcctgaacccaccggacctggtgatcctcgacctgatgctaccgggcctcgacggcctgcaggtgtgccgcttgctgcgcgccgattcggcgggcctgccgatcctgatgctgaccgcccgcgatgacagccacgaccaggtactgggcttggaaatgggcgccgacgattatgtgaccaaaccctgcgagccgcgtgtattgctggcccgggtgcgcacattgctgcggcgcagcagcctgtccgaaccccaggtggccagcgaccagatcgtcatgggcaacctgtgcattgatttgtccgagcgcaccgtgacctggcgcgagcaggcggtggagctgtccagcggtgaatacaacctgctggtggtgctggcccggcatgctggcgaagtgctcagccgcgatcagatcctgcaacgcctgcgcggtatcgagttcaacggcaccgaccgttcggtggacgtggccatctccaagctacggcgcaagttcgacgaccatgcgggcgaggcgcgcaagatcaagacggtgtggggcaaggggtacctgttcagccgttccgagtgggaatgctgaagcatgtttcgcgtactgctgcgcctctacctgatcaccatcgtcacttacagtgcggcgatttacctgattcccaagctggtgatccagctgttcgaacaccgttacatggactacaacatcgaacagtcccgtggcctgcaaaagctcatggtcaagcagtaccagcgggcgccagtggagcgctggtcccaggtgaccgaccaattgagccacgattttgcaccgctgaaggtgcaactgttgctgcgccaggacgcccgctatacccctgaggaagagcagctactggagcaaggcaagccagtgatccgcctgggcgaatggggctggatggaagaaatcagttcgccgatcaaccagcagttcgcagtcaagttgactgtgccgccagacccgctggacatgaacctgttgtactggtcgatgaacgtgctggtcggcgccgccttgctggcgtgcctgctggtgtggctgcgtccgcactggcgtgacctggagcgtttgaagggtaccgccgcgttattgggcaagggccatctggaggcgcgtacggggctcgcacccagctccagcatcggcggcctggcggcggtgttcgacacgatggccgacgacatcgagcgtcttttgaaccagcagcgcgacttgctcaatgcggtctcccatgaactgcgcacgccgctcacccgcctggatttcggcctggccctggcgctttccgaagacatgcccccggccagccgggagcgcttgcaaagcctggtggcgcatattcgggagctggatgagctggtgctggaattgctgtcttacagccgcctgcaaaacccggcgcagttgcccgagcgggtagaggtggcgctcgatgagtttatcgacagcgtgttgggcagcgtcgacgatgagctggaaaaccccgatatcgtcatcgatgtggtgctcgattgcgctgtggagcgcttcagcctcgacccgcgccttaccgcccgagccttgcagaacctgctgcgcaacgcgacgcgctactgcgacaagcgcatccaggtgggcgtgcgcgtatgccctaaaggctgtgaaatctgggtggacgacgatggcatcggtataccagcggaccagcgcgagcgcatcttcgagccgttctatcgcctggaccgtagccgcgaccgcgccaccggcggctttggcctgggcctggcgatcagccggcgcgccctggaggctcagggcggcaccttgacggctcttgcgtcgcccctgggcggggcgcggtttcgtgtgtggctgcctaacctttcgtgatcaaagcactttgactgcacggccaatcccgtgaattggcccggtgggtttgccagtgggcgagccattgggcccttccagcgtcagttcaaacaactggttcggcgccagcggcggcagcttgtccaggggtatcgacaaggtctgccccggctttaccagccccaatgaaacgggaccctgccagccatcgcctttggtccagaactccagggctttgtcagcgggaatctccatcacccccagtggaatcaactggatctgctgattatcactggcctgcaccacccagcccggtgcctggctttgtggcgccatcagcaccaccacgaagctgggtgcgggcatgggcgggcgcgtcagtaataaagccgccagcaccacgcttgccatcagccccgcggcagaaagcccgcgccagaacgccagcaggttccaccacggcacgctcgtttcgggggctttgatgcggcgttcaatgcgccgccacagctgtgccgaaggcggtaccggttgcgccagcgccaccagaggcaacaagcgctgctcccaggcatccacctgtgcgcgcagcgccgcatcatgggccaggcgttgttgcacctgcgcgcgctgttcggcgggcagggtccccagcacgtattcgctggctagttcatccaggctgtcgttcatgccatgcactcgcgcaaggcggtgaggctgcgtttgatccaggctttgactgtgcctaatggggtactgagcttttgcgcgatttcgctgtgggagtaaccgtccacataggcgtgcaggatgcaggtgcggcgtgtcgggtcgagccgttccaggcattggtggatctgcccggagcgtgcggcaaactcgatagcctgggcaggctctgccagcggttcgtactgatcgtccagcggcacgtcacgtccggcgctgcgtaccacgtccagggccaggtggcgggtcacgctgaacacccaaccccgtgcggagcctcgcagggggtcgaaactgcgcgcgccatgccagatcttgataaaggcgtcatgcacaatgtcctcggccagggccttgttgcgggtaatgcgcaatgccacaccgagcaaacggctgctgtcctgctcatagagctggtgcagggcgcgttgatcgccgcgggcgcaggctaacaggcacacttcataatcaaagatgatttcagccaaaccagaattcctgccactgaggagacgtctacgcgtggtaggcgcgaggttgctcgcgcctacctggccagcgtagctgagtttgctcagttggcggcccagaagaggtaatccgcttggtatttcaccacttccttggcgcctttgttcgccgtggtgcagggcgtagcgggagcgaccccgcctttgagcgctacccgctggatatacgtcacgccactcattgcacctttgccttcggccgggttggccttgaccagttgatagggcaggttacccgggcttgacggcgccacggccaattgcgtgccggtgatggtcgagccgtccttggcctgccaggtggcgggtgggccgaaataggtgccgacctgctggccattacggtcgttcaacacggctttggggccgacgaaggtccactcggtctggccggcggcgttggccttgtcgcggcattcataggtgatttcgccgacgccggtggtttgcatcgccagcttgtggccatccggcaccttgatgctgtccggcaggcccgcctgggcaaacgccgacggtgcggcgatgagcagaccggtcaagcacagcagtgttttagcgttcatggtgtttctccattgggtagaacagcagggttacgctgatgactacggcacaggcccgccctttggatgcagttcttggcaaaaaaaatcttagattccaaaaatgcataaactcagatcgcatcggtataagtggttataagaaaaatcgctatcctgcggccagaaatttataaggccacgggtagctggaatggatgtaggtaatattggtttcgtggttgccggcctgatcgtgggttttattgtgggcatgacgggggtgggcggcggttcgctgatgaccccgatcctgctgtggtttggcatcaacccggccaccgcagtgggcaccgacctgctgtacgccgccattaccaagtccggtggcgtgctggtgcacagcaagaacaagaatatcgactggaccatcactggctggctcaccctgggcagcgtaccggcggtgttgctgacgttatggttcctggccagcctgcacaccgaccccagcgcgatgaacgcggtgatcaagcaggcccttggcgtggtgttgctgctgacggccctggcgatcctgttcaagaaaagcttgttggcctttgcccagcgtcatgctggcgattcctaccatctgcgcccgcgcaatctgaatgtgctcactgtcgtgacaggtgcgatcctcggcaccatggtggcactgacctcgatcggcgccggcgctctgggcacggtggcgttgtttattctgtacccgttcctggccacgcggcgcctggttggcaccgagattgcccatgcggtgcccctgaccttggtggcgggcctgggccatgccagcatggggaatatggactggcatttgctggggtttttgctgatggggtcgttgccggggatctacgtgggtagccatatgacgggtaagattcccgatggggtattgcggccgtgcctggcggtgatgttgatggcggtggggtacaagttggcgttctgagtacgtggcctgacaccccacgatccaaatgtgggagctgacttgcctgcgaaggcggcctcacagtcgacaccgttataccgagtacatatccattcctgcggtaacggccacttagggttccgctctgacagcggctcacttttgaaaagcgcaaaagtaagcaaaacgctcttgccccaccactcggcacctcgcttaggctcggtnnnnnnnnnnnnnnnnnnnnnnnnnnnnnnnnnnnnnnnngtcgaattccggccagcgtggtttaacggggcgcctgagatcaaaagcagatcaagatcaagagctactcgcttcgcatcgtgggtacgcttggtgctggtcgcaactgttgctccagcaacagcagatccacaaactgctgcgatcccggacactggcaagccatcgcgtcaatcccgcttttttcccgcaacccccaggctacgggcatttgcctgcccctggcacgcttgctgcgtaagcactggtacatcccctgtgcgaggtaccgtccgatgagtcagcaagccgtgaaatttgcctattgggtacccaacgtcagcggtgggttggtcgtcagcaagattgaacagcgtacccactggggcatcgagtacaaccgcaaactggcgcaactggcggaggcggcgggctttgagtatggcttgacccagattcgcttcaccgcaggctacggcgccgaaaaccagcatgaatccgtggcgttcagccatgcgttgctcgcggcaaccaccaccctcaaggtcatcgcggcgattctgcccgggccgtggcaaccggcgttggcggccaagcagttggcgaccatcgaccaactcaccaatggccgtattgcggtgaatatcgtcagcggctggttcaagggcgaattccaggccattggcgagcattggctggagcatgatgagcgctatcgacgttccgaagagtttatccgtgcgctcaaaggcatctggacccaggacgatttcaccttcaagggcgacttctatcgcttcaaccattacaccctcaagcccaagcccctgggccaaccggagatcttccagggcggcagttcgcgggcggcgcgggacatggcggcgcgggtgtcggattggtatttcaccaatggcaatacgcccgaaggcgtcaaggcacaggtcgatgatattcgcgccaaggccgctgccaaccagcattcggtgaaggtgggggtgaatgcctttgtgatcgcccgcgacacggaggaggaggcgcaggcggtgctggcgcagatcatcgaccaagccgacccggaggcggtcaatgcctttggtgacgcggccaggcaagcaggcaaggcgtcgccggagggcgagggcaactgggccaagtccagctttgaggacctggtgcaatacaacgatggcttcaagaccaacctgatcggcacgccgcagcagatcgccgagcgcatcgtcgcactcaaggccgtgggggtggacttggtgctcgcaggctttctgcacttccaggaagaagtggagtatttcggtaaacgtgtattgccgctggtgcgcgagctggaagccaagtccactgtaggagcgagctcgctcgcgaaaaacgtcaacgaagaagtgggtagcctggtttaacgcgtggtccttgaggccttcgcgagcaagctcgctcctacagggtgtgaaggttttgaggggtttgcaaggtcagcacttcaaacccatccgccgtcaccgccacggtatgttcccattgcgccgagaggctgttgtccttggtgaccaccgtccaaccgtctttcaggctgcgggttttggcgctgccctggttgagcatcggctcgatggtaaacaccatgccttcgcgcagttccaggccggtgccggggcggccgaagtgcaggatttgcggttcttcgtgcatttgccggccgatgccgtggccgcagtattcgcgcaccacgctgtagccattggcttgcgcgtggctctggatcgcatggccgatatcgcccaggcgcgcgccgggcttgacctggcggataccggcccacatcgcctcgaaggtcatgtccaccaggcgcctggccttgggcgtcacgttgccgatcatgtacatcttgctggagtcggcaatgaagccgcctttttccagggtgatgtcgatgttgatgatgtcgccgtccttgagcaattgcttggcgctgggcatgccgtggcacaccacttcgttgatcgaggtgttgatgcagaaggggtagtcgtactgccccaggctggcagggcgggccttgaggtcattgcggatgaaggcttcgacggcgctgtccagctccagggtagagcggccggcggcgacgaagccgtcgagcatgtcgaagacctgcgccaacaggcgcccggcttcacgcattacggccaactgtgcgggggtcttgatcatcagctacgcccccggatcaggtcgggtttgtccagcaacagcttgttgatcagctcgttgtaaggcagatgcgggttgagttcggcgagcaggccgatcttgatccagaactcggcctgggcgttgatggagcggtccatgacggcgctggccaggcgcagttgttcgtgcaactgatcggtgatcttgacgatgcccataaggttcactgtgtttaattgatatacgaatcgtatatgtttcgtatggttatcgcaaacctccgtcggcttaacggtggtgggctgattggttgcgatatgttgccgaaaaaaggatttccacataaacgcctgtcccccacgctgcgggttaaacgtttaatcgatgtcgttcggcgatgatgccgaacaggccgttttctttaatatgagcaagcggtttgcttatgaggaaaggttacaaccaccacggtttttgccgagtaggcttactgattgaaagcgtcttccagggttggcaagacgtggcaggcaagtgcctgtcggatacatataactgttggcagtctcaaaaaaggagaggttagccatgctttcagaactagagcttcgcagcattattgaaggaagtttcctgcctaaacggtgcgaatgcaccaaggccgaagatgcctcgttgacgattaaagtctacgacgaccgcgaccgcgaccgggtggatttggaagtcaaaggtataaacgccgacaaactcgacagcagtcgagccatttgcaacctgatcaccgggttgcgtgaggacctcaggcacaaccacgcaccggtcctgcaacgagcaggcgggcgcggttatcactagttgatcgcttgagggtcaattgagaccgtgggcctggtatgtgccaggcccaacgctgacaagacttcagctttaccagctcactctcacgccgatactaccgctggcgccctcaaagttattgtcgtccagcccggttccatatttgccctccacatatgcgctgaccgcggatgacaattgagccacgacgccggcgccaatatcggcggtggaggacttgtgatcgctcttgatccggtccacatcatcgaacgtcaccgtgtcactgccgccaaaggtgtgccagacattggcccgtaggtacggctccacgggcctgttgctgactagataacggcctttcaggcgtgcaccgaggcggccggtccagtactcctgagagtcgaaggagaccttggagatgccatcgtgctggctatccaggtcgattttctggccgatcacctgggcttgtggctccaccacccaatgttcggacagcgtgatcgggtagccggcttcggccgataacgtcaaggcgtggccctcgatgtccatcttcactcctcgatcggacttgttgtccccgtccaggcgggtgcccatggcgacgaggtcgacgtaccagccggtgggatcggtgagggtccagtaggcgccgaagttgtcaccgtcgagtttgatccgcccggcgcgatggtcctgccagcccagcgcaaacccttttacgtcgccgcgcaggcggctctggccgataaacaggccaaagcgttgagtctgcccaccgccggtttcgctggcatagaggtcatggccgacctggtagcccttggacgtgccgtcaaaactcggcgttaccgtgcccgaccagcttttgttgaagtcactgccataggcgcgggcccaacctgccggcactgcaccggtctcggtcagcaggctttgctcgccctggcgttcatgaaaggtaccgagggcttgcagcgtcattacctgcgcagcggggatgtccactgaatagaccggcacctccaggcgatacagtgcaataggcgccgcaccggccacggcgcttggcagcacagggttgctggccgccgattgcggtgacgtgactgcggcgactgggctgggcggtggcgcgagcggcttgatcggtgccaccggctgtgcggtgggcggctccacgggcggctcatcggggccgaccactggcgcagtgggtggaatgggcgccaccgctaccggcggtacaacgggcggcggcacggagggaacggccggcggttgcaccgctaccaacgaggagcgcagataccagttgttttctgtgccggcggtaacgccgcccttgaacagcatgtactcataggccccggcggagaccgagccgttcaaggcgaacgcatcggtgctgctgacagcgccgttgagcgcctggaccacttcgatgccgttgttctgggtcagcccaccggcaccgccgaggttgctgacgcccagttgcgtgtggccactgatgctgccgtcggaaaccaccagcttgtcggtggccgagttttcatcgccgagtacggtttgcagatgcaaccggccgttgttgcctacgtagttgccatgcaccgtcaagacgctggtcgcgctgttgtcgccggtcatgtcgatcgtgccggcgttgttcagcgttgccaattggcctgcggtataggggcgaatagcgccttgggtcacggccagcgtgctgctgccatcgatgttgaacgtaccggtattgctcgcactgtcgccaaggaaaaaatccccggccaggtcaaagcgcgaggcgttgtcgaggttgaccgtctcccagccgacatagcgtgcgggcgtactggaggtggtgttatcgaaggtcagttgatcgttgcccaggccgccatcgaccgacggcgtactggccagcaggctttcactgaggttgcggagcagggcagtgtcgtcgccatcacccatcaataccgacgagttgatctggcctccacccagccagttaaacgtatcgttgccgacgctggcgcgaatctcgccattgatcacgccaccgctgacggtaatgctgtcatcgccgccgctggtactgatgttgccacctatgaagccgtttaacatgcggatcgtgtcgacatcaaagccggtgaccaagttgccttcaatggtccccccggtcatttcatagaagtttttatccagcttcatattgacccgaccgatagtgccaccgctctggtaggccacatcgccgtcctcaaaagcaccgacgatggtgccgccctccattctgaaggtgtcgagaccatcgccctggaacagggccaggatctgcccgcccgtcatgaggaaatcgtcgataccggcgccttgttgcaccacaccggtgatcaggcccgagtcgatgcgcacggcatcgaccccagggccaaaggtgacattaccgttgatggtaccggtgccgcccgcagggaggttcaggcggttatccccggaaagatcggtcaagccgggactgctgccgctgtcgcacgtgtaggtgtcgttaccggttcccggggtgagaacgcaggcggcgtgggaggattgagggatcatgtattgcaatgagatgaggccgacagctaaaacggcccgggtcgagaaaccactgggcttttgcatgggggtgtcctaggtttattgtaataactgctcctgtttttgggtttagcacagtttttcagtagcgcaatttttttgtacatgacgcgcaggccacggaatacgtggcctgcatgctggcactttgattttttgcccgctcgcctcaatccaattggtgacgatagggcaggtccggccctgtcttgctgcaggtcagggcggcagcccgaatcgcgaaacccagcatggcgtcgatctgctcgcggctcaggttctgcagcccgtcaactgaatccaactgctgttccgtcagccacgcaatcagcgccgcctggaaggtatcaccagcgcccaccgtatcggccatcaccaccttaaccgcaggttgcgaccaggtgccatgctgacggctaaacaccgacgcgccatcgccaccacgggtgaggaacaccaattggcaacggtgttgcagccagccttgcagcacgctttccggtgtgtgttcggggtagagcaggtgcaggtcttcgtcgctgaccttgatcaggtcggcgtgttgcaccagctctgcgacgcgcgcacgccacagctgaatatcgggctgcgggttaaggcgcacgttggggtcgaggctgatcaggcgcttgccgctttcacgcttgaccaggctcagcagcgtgtcaccaatgggctgtaccaccagtgaaaacgagcccacatgcagcccgcgaatctcatcgcccaggggcggcaggtgcgtcagttgcaattgccggtcggcgcagccttcgccgcgaaagctgtactgcggcgagccgttggcgcccacggcgaccatcgccagggtggtcggcgcgtcgaactcaaccagaaagcgttcgctgatacctccgtctttcagtacttgctgcaagcgccgtccaaggtaatcggtggacaggccggcgaagaacccggactcgatccccaggcggcgcagacccaccgctacgttgaacggcgagccaccggcaatcgccttgtaattgagcttggcggcctgcccgctggcatcctcctcgctgaagaaatcaaacagcgcttcaccacacaccagatacatagttgctcgctcttaaagggttgccacgtgctgttgataacgctcatacgcctgttgataggcgctgacattggcggccacgggtaaggtgcggctggcagggtcaatgctcacgcatttatcgcacaggctggccagcggttcgccgctctggcaccacgccgcctggatcgccgcgcccagggcggcggcctcgctctgttcggtacacaccacttcggtgtgcatgatatcggcgaccatctgccgccacagcgggcttttcgagccgccgccgatcaggcggatgctctggctttgcaggccggtctggcgcagcaggtcgaggccataacgcaggccgaaggtggtgccttcgaccaccgcgcggcacaggttggcgcgggtcaggttggtcatggtcaagccctgcaggctgccggtagcgtggggcagggcgggcacgcgttcgccgttgagaaacggcaacatgctcaccccctcggcgccgatcggcgcctgttcgaccagggcgttgaaggcgtcgaggtccagttcgaacagctcgcgaatcaccccggtggcattggtcaggttcatggtgcaaatcagcggcagccaaccgccgctggaagagcagaaggtcgccaccgaggcctgggggctgacgttcggctggtcggcaaaggcatacacggtgcccgatgaacccaggctcatggtgatcacgccgggggcgatattgccggtaccaatggcgcccatcatattgtcgccgccaccactggacaccaccgcgttggggttgatgcccaggcgctcggcgatggccggtaggatggtgcccaccgcttggtcggcttcgatcagtgtcggcaacgcggcttgcaggcggccgctggggtcgatgtgctggagcattgccacatcccattcgcggcggcgcacgttgaagtaaccggtgcccgatgcgtcgccgtactcggcgcaggcgcggccggtgagccagtagttgaggtaatcgtggggcagcaggatatgggcgatgcgtgcgaagacgtccggatgctgttcacgggtccagagcagcttggacacggtgtagcccggtgcgatagccacacccaggcgctccagggacccacgttcgccgcccagatgttgcagcagccggtcgttctccggcgtggtttcggtgtcgcaccacagtttggccgggcgcaacacttcaccttgttcgtccagtagcaccaggccgtgttgctggccggacacgccgatgccgaggatgtcctggccatccacgccggcctgttgcagggcgcggtgggtggcggcggtgaaggcgtccagccattcctgggtatgttgttcgcggcgaccattggcgccgctgatcaaagtgtgcgcggcggcgcccaggcccagcaccttgccgctggacgcatcgaggacgatggccttggtgccctgggtgccgcaatcgatgccgaggtaaaggttttgctgggtcatgagggagtgctcagcagtcttattgttggattgaaaatacggtcgatgtgggagctggcttgcctgcgatagcggtggtccagtcaaccctgcggtgactgccagaccgctatcgcaggcaagccagctcccacctgtttaatccggtttgttcagcaggttttgcagtgtggctgtgacgcctttgtcgcgcaggcttgcatagcaacgctcgaacgctgccacaaacgccgccgacttgggaatagccgtgccaaaaatctcttccacccccagcaatcgctggctgatcagcgcatcatcgctcaccaggttctggcagaacgctgcccgtgggtccgggatgctgtagcgcgtgccgttttcatccacgcctttcaggtacagcgcccaggccgccaccaccagcgcggcacgctcagtttcgcggccgtcggtaatcaggcggttgatggtcggcacggtgaacttgggaaacttcgatgaaccgtcggagcatacgcgctccaactggtcggcaatcgcctggttggaaaagcgatccaccagggtctgcttgtactcggtcaagtcgataccgggcaccggtgccaggttcggcgtgacatctaggtccatgtaggcgcgcatatacgccacgaacacggggtcgttcatggtctcgtgaacgaaccggtagcccttgaggaaccccaggtacgtcagagccaggtggctgccgttgagcaggccgatcttcatttcttcgtaaggcgtgacgtcatcggtgaactgcacgccgaccttttcccaggccgggcgaccgttgacgaatttgtcttccagcacccactgcacaaacggttcgcacaccaccggccaggcatcgtcaatcccgtgctggtcgtgcagttgcaggcggtgggcggtgctggtcattggcgtgatgcggtcaaccatggcattcgggaagctcacgttggccttgatccagtcgtgcagcccggcgtcgtgcaaggcggcgaaggccagcagggccttgcgggtgacggcgccgttgtggggcaggttatcgcaggacatcaccgtaaaggccggcgtgccggcggcgcggcgctgggtgagggcggcgcagataaagccgaacacggttttcggtgccctcgggtgcgccaggtcatgctggatctgcggcaggtgggccatgaactcgccgttgctgtcgtcgatgcagtaaccgccttcggtgatggtcagcgagacgatgcggatctgggggctggcgagtttatcgatcagcgcctgggcgccgtcttcggccagcagcatgtcgctgatcgagccgatcacacgcacttgcgtgtcgtcggtgtcgcccagttcatacagggtgaacaagtaatcctggccggcaaggtcgtcgcgggccttgcggtcttcactgcgcaggccgacgccgcagatgctccagtccaggccctcgccggtgttcatcagggcatcggtgtaaaacgcctggtgcgcacggtggaaaccgccgacgccaatgtgcgcgatgccctggcgggtatcggcaagcgcgtaggtcggcacctgcacttcgggcgccagttgggtgaggttggctttattcaatttcatcgggaaatactcacgaaatcaggcggcagggcgcagtgggcgggccacggcgacgccatcggcgtcgaacagatggcagtgcgccgggtccaggtgcagctggagcgtctcgccgtattggctggccatgtcgccacggatacgcatggtcagcggctcgccgttacgggtgatgacgtggcagaacgtgtcgctgcccaggcgctcgccgacgtcggcggtgacggtcagggtggtttgccctggtgtggcgatttccagatgctcggggcgaatgcccagggtcaccgcgctgcccacgctcagggtggcgccgctcaacggcaggttgatcagggtgccggcgtccagttgcacctcgcagccttggctgtcgacgcgggtgacctggcccttgaggaagcccatcttcggcgtgccgagaaagccggccacaaacaggttggccggctggtggtacagctccagcggcgagccgacctgttcgatgcgcccgctgttgagcaccactaccttgtcggccagggtcatggcttcgacctggtcgtgggtcacgtagatcatggtcgcttgcagttctttatgcaggcgcgccagctccaggcgcatttgcacgcgcagggcggcgtcgaggttggacagcggttcgtcgaacaggaagatcttcgggttgcgcacaatcgcccggccaatcgccacgcgctggcgctggccgcccgagagctgcttgggcttgcgctccagcaaaggccccagctcaagaatacgcgccgcttcgctgactttgctctcgaccagtttcttgtcgacaccggccaggtccagggcaaatgacatgttcttgcgcacgctcatgtgcgggtacagcgcgtaggtctggaacaccatggccaggtcgcgtttggccggggtgacttcggtgatgtcgcggccatcgagttcgatggtgccgtcgctgacttcttccaggccggcgatcaggcgcagcagggtggacttgccacagcccgacgggccgacgaacaccacgaattccttgtcgttcacttccaggtcgatgcccttgatgatggaaaaaccttcgaagcctttttgcagattcttgattttcaggttggccatgatgggcctcctttttgaattattatttgacggcgccaaaggacaaaccgcgtaccaactgcttctggctgatccagccaaagatcaggatcggcgcgcaggccagggtcgagacggcggacaacttggcccagaacaagccttcggggctggagtaagaggcgatcaaggcggtcaacggcgcggcgctggaggaggtcaggttcagcgaccagaacgcctcgttccagcacaggatcaacgacagcaacaccgtggaggccaggccacccttggcaatgggcagcagcacccgcaccatttcctgccacagggaggcgccgtccaggcgggcggcttcgaggatgtccttggggatgtccttgaagtaggtgtacaccatccacaccacaatcggcaggttgatcagggtgtagatgatgatcagcgcaatgcgtgtatccaacaggccaaagctcttggccaacaggtagatcggcatcagcacgcccaccggcggcagcatcttggtcgacagcatccacagcagcgtgcccttggtgcgctgggtttcgtagaacgccatggagtaggccgccggcaccgaaatcagcaggcacagggcggtggcgctgaaggaaatcaccaccgagttccaggcgtaggcgaagtagttgctgcgctcgttgatgtgcaggtagttctccagcgtcggcgtgaagatgaactgcggcggggtggcgaacgcgtcgatttcagttttgaagctggtcagcaccatccagaagatcgggaagaaaatcaggatcgcgatggcccaggccaacgtgccgagcaacaggctttgcaggcggcgggattgttgaagcgtcatggcgcggccctcaaggcttgtcagtcaggtttttgccgatcatccgcaccaggatgatcgccgcgatattggcaatgaccacggcaatcaagccgccggccgaggccatgcccacgtcgaactgcaccagcgcctggttgtagatcaggtaggcgaggttggtggaggcgtagccggggccaccgttggtggtggtgaagatttcggcgaacaccgagagcaaaaagatcgtttcgatcatcaccaccacggcaatcgggcgcgccaggtggggcaaggtcaggtgccagaagatcgcaatggcgccggcaccgtccaggcgtgcggcctctttttgttcctggtccagggactgcatggcggtcatcagcagtaggatcgcgaaaggcagccattgccacgacacaatgatgatgatcgacagcagcgggtaatgcgccagccagtccaccggctcggcgccgaagaacttccacacggcggcgagaatccccgacaccgggtggaaaatcaggttcttccagatcaacgcgccgacggtgggcatgatgaagaacggcgagatcagcattacccgcacgacgccgcgccccaggaactcactggcctccagcagcgcactgatcaacacgccgaacaccacgctgatcagcaacacgctgcccaccagcaacagggtattggtggcgccgggcaggaaacccgagtcggtgatgaagtagctgaagttttccaaccccacgaattggttttcgccggggtagagcaggttgtagcggatcagcgaaaagtacagggtcatgcccagcggcacgatcatccacagcagcagcaaggccaccgaggggctgacgagaaaccagccggggttggccaggcggtttttggtgggtgtattcatggtgatcagaaccagtcagatgcctacagaatctgcgtcggagcgcggtcactgtgggagctggcttgcctgcgatggtatcgcctcggtgctactgatagaccgagttgtttgcatcgcaggcaagccagctcccacaaaagccctgctcctacatttgcgcgggtgaaattgggttacttggggtaaccagcccgcttcatttcccgctcggtggtgttctgcgcggcggtcaatgcagcatcgacggtttgctgaccggtcaacgcccccgagaagaacttgcccacctgggtaccaatcgcctggaattcaggaatggttaccaactggataccgatatacggcaccggcttctcggttggcttggtcgggtcggccactttcagcgactccagcgtcaccttggcgaacggcgctgccttcatgtattcatcgctgtaggtggattggcgcgtaccgggcggcacattggcgatgccatcggtcttggccaccagctgtccgtattccttggaggtggcccaactggtgaacaccttggcggcgtccttggccttggaactggtcgggatcgccaggctccaggagtacagccacgaggtgcccttatcggttttctcatggggcgcgaaagtaaagcccacatggtctgcgaccttgctctggctcttgtcggtgacaaacgagccggccacgctggcatccacccagatcgcgcacttgccgctgttgaacagcgccaggttttcgttgaaaccgttgctggaggcacccggcgggccggatttcttcatgttgtcgacgtagaagttcagcgcgttcttccactcggggccgttgaattctggctgccacttctcatcgaaccagcgcgcgccgaagccgttggccagggtggtgatcagcgccatgttctcaccccaaccggctttgccgcgcaggcacaggccgtattgctctttggacttgtcggtgagtttggcggcgaattcgccgatctggctccaggttgggtgctcgggcatgctcagcccggcgtccttgaacaggtcggtgcggtaataggtgatcgagctttcggcgtagaacggcagggcgtacaacgagcccttgaccgacaagccgtcacgcaccgaagggaacacatcgtcgaggtcgtaggacgctggcaagtccttcatcggctccagccaccccttggcgccccagagtgcggcttcgtacatgccgatggtcaacacatcgaactgcccgccttgtgtggcgatgtcggtggtcaggcgttggcgcagcacgttttcttcgagcaccacccagttcaacttgatctccggatgctcagcctcgaaggttttcgagagcttctgcatgcggatcatgtcgctgttattgacggtggcaatggtcagggtttgcgcgccaaggctgacggcgctgagggtcatgcaggtacaggcaagcaatgcttttgctgtgaacttcatcgcgcactccatttccgcgcccagagggctacagaaggacggttattgttgttgtgtcttcctacaaggagtcaggaagagtgtgcgttgattacagccttcaaaagcggcggtgacaaatccttgggagcacgcttactgatacttttttgcactcgtcgaccacctgatcgttcccacgctccgcgtggtaacgccgctagggacgctctgcgtaccggggtgacgcagagcgtcacggtatgcatgcccacgcggagcgcgggaacgatcctcagtgcagtgtttaacacttgatcgttcccacgctctgcgtggtaacgccacttgggacgctcagcgtcccggaatgcatgcccacgcggagcatgggaacgatcagcgcagtgtttaacgctcaatatcagccagtacacgttcagccaacaaccgagacacctcgatcaactgtgcaatacccagcgcaccttctcgtcgcgagccgtcgagttcaaaggcgaaatcgcaggtgagggcgtgggcagaggcgagggattcgctgaggttgaccagcaggtcttgggtgcagatgccgtctttaacggtgaatagcacgctgggtgctggatcgagcgagggatttgaggtgggtttgatcatggtcaagctccgcagatgtattaaagaatccggagaaatacaggccgcgacgcccgaccgctgagtgtgcagcggtgtaaggagactagagatggagtgtcctaggggcaacctcaaagccgtgtaagacgtttctgtttttcccaatacctagccgaacggacagttgtttggcttagcgccggccagcaacatctttcttgcgccagttcggcgctattccctttgcacacatcaacgccatgaccgcgtttgagtacccctgcgcgctgaaaaaggacaaaacatgaagagcactgatacgcaaatccagcaggtaaccggcccaatcaacgcctctctcaacgaccgcgtggagaagccgatgtgaagcgctacaacatcaccacgggttcaaccaccacggtgggtggcaaggtaaccagcggttgtgagggcaccagttnnnnnnnnnnnnnnnnnnnnnnnnnnnnnnnnnnnnnnnnagaaaacatcacctggcaggatacgatcatttcgtttccggctgattcgggtgtgccgccgttgtatttggtgtttgccaagccggcggtcaggccgttggaggttgatatttatggtgcgttcagtggacggcctcgtgaaggaatgcacttggatcacatgccttcccaagcggcgttagagtattacttggtagaaaattttccgcatcttgatgaagttgatcggaagcaggcaatgaaaaacgctgtgagcatcgcgataccatctcgtgttcatcagaaatacagtgagaccttcggaggcagaaacacaaaattcaaacgacaggtggatgcagctgatttacgaggtgcggtagagcgaaattttaatgcaataaagccctacatgcttgaggaagggttcaaagaagcggaccttgaagatgcgcggaccaagatgcataaaatcaataaagaaatggggtggtattaatggacgcgccaacgattaagttgtgggtggagagtttaggactcggttttaccgaacttgtagcaagtgggaaggttcccaatcaaccgctgatgaagccatttgaggacagcgattggccgaccatgcgtccagtagagggagtggagttgctcttcaatgacaggaccaagtccctgaagcagattctgatcacactcatcccgacggtcgggcaaccggtttatgctggagggttacccgctccattttccctgttgattaatcagcaaagtgtgcgtagtgctttgggagaacctattgattcgagaggtcgtgccaggcttccaggggggctgggtatacggggagggtgggatgcatataagttgtccaacgaatggcatccgaatgcaaaagttataattggttatcttgaaagctatgctgtaaacaatatcagtttctcggtgataaattagaagcgtgttgcctcaagcatggagcaggtgaactgccaatatgatcgccagttgcaaactggtgatcgcttgctctgtgctgtccttaatcctcgataggagacaatgttcgcctgtggagattagtcattcgatcaagcaagtcgccaaggcatagaggttgatcattctcgccggcacgatatcaatcagaaacaagggtggtattaatggatgctgcagcgattaacaagttgatcagtcggctgggacgcacttacgccgaattgatcagtgagggcttgattttcagaggctcattgatgccgttgttggataccgcggaaaacgaagagtgggtccagtttccggtcgaaggcgtagagctctggtttgcaaaaaaaatgtgatatttgagaaggtattattaacgcttattcaacgcgacgaaaacgatcacgtttacaaagggggtctaccgtcccccttcgttagccagatgaatcagttcagcgttcgtagcgaactaggtatgccatataaatctataggtcctagcaaactgcccggtagtggtagcaaaaaaagtggtggatgggacgcatatcgactgcatcaagaaacccatcccggcgtccgtgtaggtttcagctacaatgccgaaatgatggtcgaaacgctaacttttgcattgtgcagcggagaataagccagttagtttgacttgtttcgagccggtttctgctcagttagccgctgcaacgccaagcgcagatagtgcttctttgattttaatcaagtgcaggtgatgagttcggtattggagcctctcgtcagcagcgatgacattaaccaaactcaggagggtactggtgggcgccggtgcgatcagtcgtttagttggagggcttggttttccttatcaaaaattggtgagcgaagggctcattcaggatttactgctcaagcggctctttgatacgtctgataacgaggagctgattcaaaatccagaacccggcgtgaaattatggttctgggcagaaacaaaacggctggaacaagtaatgatcgtcctgattcaaacagtcgggcagcctgtctatgccgggcaattacctcaaccgttcaagttagatatggatcaacgatacgtacgtgaggttttaggtgtgcccactaaatccaagccctccgtaaaactgcccggtggattgggcgtgcggggcggagcagacatatattacttggaccaaaaggtacatcccaacgtgatggtagctctcagctatctggaaaatcttagagttaacaatatcagtttctctttgattgattccggacacgattgagctctcacagaggcttgctatagctatggagcgtcgaattgccaacatgatcgccagtggcaattagctgtttgctccagcaagtctcccatgattttacgtgtggccaagaacagaattcgctctttctcagatagacgataacagtcaaaaataaggatggtattgatgggcgtcgtgacaattgagcgttggatcaaacatctaggatggctctatgaggatttaatttttcatgggattattccagacctgccactcactgagctctataacgggcgtgattggttatcgctgaaaaaatcagctgacggcctggagttaagcttctgggctgagacgaggaggtacgagcgactctttatcaccctgcgctctactgttgaaggttcaacagagtacaagggtgaacttcccaagcctttcgcgttattagcatccaagtcagaggtgcgagcagctttcggtatgcccatggaatcacaaggcctgacgaagctgcctttggataccgtattgggtggctttgatacttattcgctggatcagattaacttcccaaatctgaaagtgtcctttcagtacacatccacaatgcagattaaaacgttggttttttcgttaatcaaccgaggtcatccttagtacagcagcaaaatttatctttaacgtagaaaagcgtggaatactgaaaaagggcacgcatttatttaagccgaaataaatgcgccccctttatgccttatgactgttgaacaagcggaaaaaacgtccaagtatacggcgccacggactgaccggccctatcacattgatcgtatcgatcaccatgatccggttggatttgaaattaaggcgcactgaaacttcgccggtcactgtggaccggaggtagaaccggtaaagggcaggctttccaggcgttatattatgcagttcttccgagcctcccggatgagtggcaatgagtgtttcgcccgtttgctcgccacgtagccgaatggtcaactgaatgtcttcaagtccggtcaatgcccggccccaatctctggctaccgctctggagaaccagcggtattgattgtcgtaatcgtcctcatatatctcgccctcaccggtccagctccaagtgtcccctgggatatcgaaacgtgtggattcgttgatagcaaaaacagtcgtcgactttttcatggcgaattccgctcggatgccagaaccccagcatggctaacctcctggctgtacgacactgtcagaatcgacagttctgaccagtggatgccccgcttaagccagattttgctccgtcaaccgctgcaccgccaaccgccgatagtgagacggcgtcatccccttaagctgctgaaaccgccgattgaagttggaaatattattgaaccccgactcaaagcacacatccgtcaccgccttgtccccatcggccagcaattcacaggacttgctgatgcgcagccgattgacgaattcaataaaagtgcgcccggtcgcctgtttgaacaccctggaaaaatacgttggcttcatccccaggtactccgccacttcttccagcggcagctcccgggcgtagtgggcaaagatgtagtccaccgcgcggttggtgcggtcgatgctgtgttcgtcggcttgctgtggcgtggtgacgccggacagtaactggtagtcctcacaggcgcttaatacttccagcaggatgaagaagtgccccaggcgtgccatgccttgggcgtcttcgatacgttgcatcagggtcatggcgtgggcgatggtttttttgcagcgaaattcgatgccgtattgcgcacgttcaagcagcggcgccaggcttttgagttcggtgaagatgtggctgccgtgttcgaacaattcatcggtgaagttcaccagcatgtcgcgcttgggcacgatttcgtcttcttccacctggctgatccagttatgcggcaggttggggcccgtgaggaacaggctttcggggtagaagttgccgatgtagtcgccgataaacaccttgccggagctggcgacgatcaggtgcagttcgtattccttgtggaaatgccagcgcaccagggggcaggggaagccgtgctggcgataaatgatggacaggccgttgtggtcgtccatcaactcgtaggaagggtcggtgatgcgcgttgctcgggtcatgctgccgtcgctttattgtggttgctgcgtaggataatgccccgtcgcgcgcgacctcgccagcgccagtgtttatagggtgcggtttttggcctcgatccactgggacatgtactgggtacttttatgcgcgtggtggcgcagcatgctgccggtgaagttgtcccggcgatgggccgcaaggttgctgcggcaacgttccaggcattccaccaaggcgggcccgtgcacgtcctggtcatagcgccgggccagcagttggcgcccttgttcctgggcctgggtccagcgctcgcggctttggtaaagggccacggcagcggcggccagggccgtggcgtcctgtgcgattacgccgggccagggttggtcatcgcccatggcctcggcaccgatgggggtggtgacattgggcgtgccgcacagcatggcgtccaccaacttgcccttgatgccggcgccaaagcgcagtggtgccaggcagatacgcgcggccgtcatgacttgcagcgcatcttcggcccagttcatcacatggaaaccctgcgccgggttgtgcagggccgtggccttgggcggcgtgtaggcaccgtagatgtgcaactgcgcgcccggcagttgttggcgaatcagcggccacaggctgtgcttcatccaaagcaccgcatcccagttgggcgcgtggcggaagttaccgatgctgaggaaatgcgcacggtcttcaaagggcgcaaatgcgtcggtgggcggttgcagcatcaacgggcaccagtggagcagggcggccggcaccttgaactgttcggtgagcaggcggatttccacgtcggagatcatcaggctgatgtcacagcggtagatggcggcgatttcgcgtttggccaagtcggtatcggccatgcgctggaactcgtcctccaatgccggcgcgaacagggcgctgaagtcgtcgctgtcggggttggctttcacctgctccttgaaacgctggtggcgagcgtcccgcaggctttgcaggtcggaggtctccagcacccgcagggcgtcggggcagcattgttccacgcgccagccgaattgctcctccatcatgaaacggtcgaacaatacgatgtccggggccagttcgcggacaaagtcatcgaaactgctgttattcagttcgatggcgcgttcggcgattccgagtgcgggcaggtcggccttgtgctcgccaatggtggcggggctgctgaaggtaatgtcccaaccttgcgtaagaaagctctcaaggatttgcatcatatgcccgcccgctgccgaggagcggggctcgggccagacgtagccaatgaccaggactttggtggcgggttgatgcatgaaatgagtccttcgtgccgtcggcgggccttaaaaagcgaatgattaaatcatacttttgcgtcgcaacaagccttgcgagcaaatgctgattaatgcgtggtttttaattgcgaaatgagcttgtggcctgtcaacgttcacagttatcgcggcttgtgcagggtgttaggttcgctacagctttccggatgtagggcggtcggaaactcatcaaatcgtttttaggaggtgcctaccatggatgaccatgaacaaaccaacaaggggaacgcggttaaagctgattggcataacgtcacattgacaaggggtgttaccggctatagcggcaatttgcgtatcaggtttcagcgctcaggtaacacgctgacgttgaccaccgaggagtacatgatcagcggcgatagttcacgtaacaaagccaatattaattacgaggtcaaggtcggcaacaacacggtatgggacctggactcgcccgatgaccgtaagcaggatgggcagtggcatacttggtcaaactacaagtcagtagcgattccgagcgggactcagacggtaacgttcagggcagagtttatctttgatatgtccggacccgatgatcgggcaatagcgacgcatgccgtaagcatctagctcgcgagcgccaacgtcttgccgggcacctccggtgcccggcatttcctgtctatcgaactgaatctaaatcagcgcaatttcggcgggtaagcacgtgttcgcgcccgattccagacggtgtcggtattgatcatgcgtgaggacatgacaatttgtgtctggcggtaggtagcttcggcactttgtggttaacttccgcctctcgaattcgtttaaccaaacccagcataaggattccgttcatggctcaagtcacccttaaaggcaacccggtccaggttgaaggcgaactgccgaaagtcggcgccaaagctgcagacttcaccctgaccgccggcgatctgtccaacgccaccctggctacctttgccggcaagcgcaaagtgctgaacatcttcccaagcgttgacaccccaacctgtgccacttcggtgcgcaagttcaacgcccaggccaacgatgtggccaacaccgtggtgctgtgcatctcctccgacctgccattcgcccaagcgcgtttctgtggttccgaaggcctggaaaacgttaagaacctgtcggatttccgcaacgccgacttcgccgttgactatggtgtttccatcgctgacggcccgctgcagggcctgaccgctcgcgctgtcgtggtgctggacgaaaacgacaacgtgctgcacagcgagttggtcaaggaaatcgctgaagagccaaactacgacgccgccctggctgtgttgaagtaactgtttctacgtatgactgtcgtttggcagtaacacgtatgatgcatgatcgcggcctggcctagtccaggccgtttttatttgagcgtcagcggcttagcgaaatagccggtggactaagatcaaaaagttaaacgttgtaagcctaaggtaaatagccggtaaaggtgcttttctaaacgcaccccagtgcttatctttcagcctcccgaagaagaagctctcacccccaatggttgatcactccatgcaatcctcctcccgcaactcccgccgctggctgtttggcctgctcgtgctgctggttatcgccggcctgtgctggaaattctggcccagtggcgcagcccataaagatgctccggcggggcacacgggcaagaccggcatggcgcgcccgggcttcggtggttccaccgggccggtaccggtgcgtgtggcgccggcggtgctgggggaatttccggtgtactacaaggccctgggtacggtcacggcgctgaacaccattaatgtgcgcagccgggtgggcggtgagctggtcaagatcgccttcgaggaagggcagatggtcaaggccggcgacctgctggcagaaatcgacccgcgcagctaccagaacgctttgctccaggcccagggcaccttgctgcagaaccaggcccagttgaagaacgcccaggtcgatgtacagcgttaccgcgacctgtacgcccaggacagtatcgccaagcaaactctggacaccgccgaagcgctggttctgcaataccagggcacggtcaagaccaaccagggcgcggtggacgacgccaagctcaaccttgaattcaccaagatccgcgcgcccatcagtggccgcgtcggtttgcgccagcttgacgtcggcaacctcgtcgccgccaacgacaccaccgccctggcggtgatcacccagacccagccgatcagcgtggccttcaccctgccggaaaataccctggaaaccgtgttggcccgttatcacgcaggcaacaagttgcccgtggaagcctgggaccgtagcgacgtgaaaaaacaggcggtcggtgtactgcaaagcctggacaaccagattgacgtgactaccggcacgctgaaattcaaggcgcgtttcgataacaaggaccaggcgctgttccccaaccagttcgtcaatgtgcacctgctggccgacaccttgaacaacgtagtgctggcgccctccgcggcgatccagttcggcaacaatggcacctttgtctacaagctcgacggcgacaagaaggtcaaggtccagccgctggtggtgggcgacaccgacggcgaaaacaccgtgatcaaggaaggcctggccgctggcgaccgcgtggtgctggaaggcaccgaccgcctcaaggacggcagcgagatcgaagtggtcaacgccagcagcgaggtgccgaccacgccgaccgaacacctgcaaggcaagcccgcagcgaaaggggagaccggtgctgacgccggcaaggcgcaaaaggtcggttcatgaacctgtcgcgcctgttcatccttcgcccggtcgccaccacgctgagcatgctggccattgtcctggccggcatcatttcgtaccgcctgctgccggtgtcggcgttgccccaggtggattacccgaccatccgggtgatgaccctgtaccccggcgccagccccgatgtgatgaccagcgcggtcaccgcaccgctggagcgtcagttcgggcagatgcccgggctgacccagatggcgtctaccagctccggcggtgcctcggtactgaccctgcgtttcaacctcgacatcaatatggatgtcgccgagcaacaggtgcaggctgcgatcaacgccgccaccaacctgctgcccaaggatttgccggcgccgccggtgtacaacaaggtcaacccggcggataccccggtgctgaccctggcaatcacctccaagaccatgttgttgcccaagctcaatgacttggtcgacacgcgcatggcgcagaaaatcgcgcagatcagcggcgtcggcatggtcagcatcgccggtggtcagcgccaggccgtgcgcatcaaggtcaaccccgaggccctggcggccaatggcttgaatctctcggacgtgcgcgccctgatcgccgcctccaacgtcaaccagcccaagggtaactttgacggccccacccgcgtgtcgatgctcgatgccaacgaccagttggtttcgcctgagcaatatgccgaactgatcctggcctacaacaatggtgcgccgctgcggctcaaggatgtggcgcagatcgtcgacggtgccgaaaacgaacgtcttgccgcctgggccaacgagaaccaggccgtgctgctcaatatccagcgccagccaggcgccaacgtgatcgaggtggtggaccgcatcaaggccctgctgcccagcatcaccgacaacctgccggccggcctggacgtgacggtgctcaccgaccgcacccagaccatccgcgcctcggtcaaagacgtgcagcacgaattgctgatcgccattgccctggtggtgatggtgacgttcctgttcctgcgccgcgtcagcgccacgatcattccgtccatcgccgtgccgctgtccctggtgggcacctttggcgtgatgtacctggccggattctccatcaataacctgacactgatggccctgaccatcgccaccgggtttgtggtggacgacgccatcgtgatgctggaaaacatctcgcgctatatcgaggaaggcgagacgccgatggcggccgcgctcaagggcgccaagcagatcggtttcaccctgatatccctgaccttgtcgctgattgcggtgttgatcccgctgctgttcatggctgatgtggtcgggcggctgttccgcgaatttgctatcaccctggcagtggcgatcctgatttccctggtagtgtccctgaccctcacgcccatgatgtgcgcgcgcctgctcaagcgcgaacccaaggaagaagagcagggccgcttctacaaagccagcggcgcctggattgattggctgattgaagcctacggccgcaagctgcaatgggtgctcaagcaccagccgctgacgttgctggtggccatcgccaccctgggccttacggtggtgctgtacctggtggtgcccaagggctttttcccggtgcaggacaccggggtgatccagggcatttccgaagcgccgcagtcgatttcctttgcggccatgagccaacgccagcaggagttggcgaagatcatcctcgccgaccctgcggtcgagagcctgtcgtcctacattggtgtggacggcgataacgccaccctcaacagcggccgcttgctgatcaacctcaaggcccacggccagcgcgacttgagcgccgcccaggtgatcacccgcctgcaaccgcagatcgacaagctggtgggcatccgcctgttcatgcagccggtgcaggacctcaccatagaggaccgggtcagccgtacccagtaccagttcagcatgtcctcgccggacgccgagttgttggcattgtggagcggcaagctggtgcacgccctcagccagttgccggaactcaccgacgtcgccagtgacctgcaggacaaaggcttgcaggtgtacctggtgattgatcgcgatgcggcctcgcgcctgggcgtgagtgtttcgaccatcaccgatgcgctgtatgacgccttcggccagcgccagatctccaccatctacacccaggccagccagtaccgggtggtgttgcaggcccagtccggcgaaaccctcggcccggcggccctcaaccagatccatgtgaaaaccaccgacggtggccaggtacgcctgtcgagcctggcccatgtggaacagcgccaggcgcaattggcgattgcccatatcggccagttcccggcggtgatgatgtcgttcaacctggcgcccggcgtggcgctgggcaaaggcgtggagctgatcaaccagacccagaaggacatcggcatgccggtgggcgtgcaaacccagttccagggggcggcccaggcgttcgaagcctcgttgtcgagcaccttgctgttgatcctggcggcggtggtcaccatgtacatcgtgctcggtgtgctctatgagagctatatccacccgatcactatcctctcgaccttgccgtcggcggcagtgggggccttgctggcgttgctgctcagcggcaatgacctgggcatgatcgcgatcatcggcatcatcctgttgatcggtatcgtgaaaaagaatgcgatcatgatgatcgacttcgccctcgacgccgaacgcaaccagggcctggacccacagacggcgatctaccaggccgcgctgttgcgcttccggccgatcctgatgaccaccctggcggccttgttcggtgcggtgccgttgatgctcgccagtggctccggcgccgaactgcgccagcccctgggcctggtgatggtcggtggcttgctggtaagccaggtgctgacgctgttcaccacgccggtgatctacctgtacttcgatcgtcttggccggcgctggcgcaaagagccgcaacgcctggagccggttgagccatgaacctgtccggacctttcatccgccggccggtagccaccatgctgctgagcctggcgatcatgttgctcggtggcgtgagcttcaacctgttgccggtgtcgccattgccgcagatcgacttcccggtgattgtggtgtcggccagcttgcccggtgccagccccgaggtgatggcttccacggtggccacgccgctggagcgctcattcggcgcgattgccggtatcaccaccatgagcagttcctcgagccagggctctacccgggtgattctggcgttcgattccgaccgcgacatcaacggcgcggcgcgggaagtgcaggcggccatcaacgcatcgcgcaacctgctgcccagcggcatgcgcagcatgcccacctacaagaagatcaacccgtcccaggcgccgatcatggtgctgtcgctgacctccgacgtgctgcagaaagggcagttgtatgacctggcctcgaccatcctgtcccagagcctgtcccaggtgccgggcgtgggcgaagtgcagatcggcggcagttcgctgccggcggtgcgcatcgagctggaacccaaggccctcgatcagtacggcgtcgccctggacgatgtgcgcaacaccatcgccaacgccaaccagcgccggcccaaaggctccctggaagacagcgagcgcaactggcagatccaggccaacgatcagttggaaaaagccaaggactatgagcccctgctgattcgctaccaagacggcgccgccctgcgcctcaaggacgtggcgaagatcactgatggcgttgaagaccgctacaacagcggcttcttcaacaatgattcggcggtgttgctggtgatcaaccgccagtccggcgccaacatcatcgaaaccgtacggcagatcaaggcgcagttgccggcgttgcaggcggtgttgccgtccagcgtcaagctcagcctggccatggaccgctcgcccgtgatcaccgccaccctgcatgaagcggaaatgaccctgctgattgccgtggggctggtgatcctggtggtgtacctgttcttgggtaacttccgtgcttcgctgatcccgaccctggcggtgccggtgtcgttggtgggcacttttgcggtgatgtacctgtacggtttttcgctgaacaacttttcgctgatggcgctgatcctcgccaccgggctggtggtggacgatgccatcgtggtgctggagaacatttcccggcacatcgacgagggcgtgccaccgatgaaagccgcctacctgggcgcccaggaagtcggctttaccttgctgtcaatgaacgtgtcgctggtggcggtgttcctgtccattctgtttatgggcgggatcgtcaccaacctgttccgtgagttttccatcaccttgtcggcggcgatcatcgtctcgctgattgtttcgctgaccctgacgcccatgctgtgcgcccgctggttgaagccgcatgtgaaggaccggcagaccggtttgcagcgctggagccagaaggtcaacgaccgtatggtcgccggctacgccaccagcctggactgggtgctgcgccatcggcgcctgaccttgctcagcctgttggtcaccgtgggcgtgaatatcgcgctgtacgtggtggtgcccaaaaccttcatgccccagcaggacaccggccagttgatcggttttgtgcgcggtgacgatggcctgtcgttcagcgtgatgcagcccaagatggagatctttcgccaggcggtgctcaaggacccggctgtgctgagcgtagccggttttatcggcggtaataacggtaccaacaatgcagtgatgctggtgcgcctcaagccaatcagtgaacgcaagatctctgcccaggcagtgatcgagcgcttgcgcaaagaggtgccgctggtgccgggcgggcgtttgttcctgatggccgaccaggacctgcaatttggtggcagccgcgaccagaccagcgcgcagtattcctacatcctgcaaagcggtgacttggccgcgctgcgcctgtggtacccgaaagtggtggcagccatgcgtgaattgccagagctgaccgccatcgacgcccgcgaaggccggggcgcggcccaggtcacgctgattgtcgaccgcgaccaggccaagcgcctgggtatcgacatggacatggtcacggcggtgctcaacaacgcttacagccagcggcagatttccaccatctacgacagcctcaaccagtaccaggtggtgatggaggtcaaccccaaatacgcccaggacccgatcaccctcaaccagatgcaggtgatcaccgccgacggcgcacgggtgccgttgtcgaccattgcccattatgagaacagcctggccgacgaccgcgtcagccatgaaggccagtttgcttcggagaatatcgccttcgacatggcgcccggggtcacggtggagcagggcacggcggccatcgagcgtgcgattgccaaggtcgggctgcccgaagacgtgatcgccaagatggcaggcactgccgatgcgttcgccgcgacccagaaaggccagccgttcatgattctcggcgcgctggtggcggtgtacctggtgctgggtattttgtatgaaagctacattcacccgctgaccatcttgtctacgttgccgtcggccggtgtcggtgcgttgttggcgatctacttgctgggcggcgagttcagcctgatctccttgctgggcttgttcctgttgatcggcgtggtgaagaaaaacgcgatcctgatgatcgacctggcgctgcaactggaacgcaacgacggcatgagcccgctggagtcgatccgcagtgcttgcctgttgcggctgcggccgatcctgatgacgaccctggccgcgatcctcggtgccttaccgttgctgctcggcagcggcgacggcgcggaaatgcgtcacccgctgggcctgaccatcattggcggcctggtgttcagccagatcctgaccctttacaccaccccggtggtttacctttacctggaccgcgcgcgccaccgcttcaacgcctggcgcggcgtgcgtaccgatgctgccctggacactgcgctatgaccgacccaaccaacgcccctgcaacccctgtaggagcgcgcttgctcgcgaagaacgcccatgcgccgcgctcatcaagaatgagcgcgttatcgttgacggcgttcgcgagcaagctcgctcctacagtgggcctggctatgttgctcagcgcctgcgccattggccctgactacaaacgcccggaggtcatcgagccggtgcaattcaaggaggcccagggctggcgccaggccaaccccagcgactccctggcccgcggcgcctggtgggagctgtacggtgaccgtcaactcaacgacctggtggtgcgcctcaacgcctccaaccagaccgtcgcccaggccgaagcgcgttttcgtcaggcaaaggccctggtgcgcagctcacgcggggcgttttaccccagcgttgacctgagcgttggcaaaacccgcgccagccagggcaccggcagcagcagtgccagtctcagcagttccagtagcggaattcgcgacacccttaacgcccagttaggcgtgagttgggaagccgatatctggggcaaattgcgccgtggcctggaggccaacgaagccagcgccgaggcaagctcggccgacctggccgcaatgcgcctgagccaacagtcggagctggtgcaaagctacctgcaattgcgggtcatggacgagcagacgcgcctgctgcaagccacgttggacacctaccagcgctcgttgaaaatgaccgaaaaccagtaccgtgccggtgtggccggcaaggatgccatcgcccaggcgcaaactcagctcaagaccacccaggccagcctgattgacctgatctggcagcgcgcccagctggaaaacgccattgcggtgttgatcggcgaggcgccagccaacttcaacttggcggtgagcaaagacatcccggccctgccgcagataccggtgagcctgccgtcccaattgctggagcggcgccccgatatcgcctcggccgaacgctcggtgatcgccgccaacgccaatattggcgtggccaaggcggcctattaccctgacctgaccttgagcttggcggggggctactccagcagtacctatgaagattggatcagcctgccgaaccgcttctggtcggtggggccgaaactggccatgaccctgttcgatggcggccagcgctcggcggaagttgaccgtaccgtggccagctatgacgagaccgtggccaagtaccgccagaccgtgctggacggttttcgtgaggtggaaaactacatggtccagctcaaggtgctcgccgatgaggcggtggtcagcaatgacgcgctggaagcggcgcgtgaatccttgcgcttgaccgaaaaccaatacaaggccgggttgattgcctatctggatgtggtcacggtgcaggcgacggccctgagcaacgagcgcaccgtgttgaccttgctgcaatcgcggctggtggccagtgtgcaattgatcgccgccttgggcggaggttgggacggccagacctccctggctgaaaaggaataaccgggtgcgccgcgcattctgtgggagcaagacccaatgtgtgggcttgccccaatgtcagtcagttaagcacagctccctgtgggagctggcttgcctgcgaaagcgttagtgcagtagcagatggggtgactgacacaccgctttcgcgggcaagcccgctcccacaggggatttgcgcaaaccccgcattttgatgtccgtgacgtcgttgaaaacacctgctgaagccagccgattgacgccaaaaactgcgtaatggctaacggatcaattaatcacctgcctcggattcatactcgctacaatcgcccgatttgccacccggcacggggttttgcgccccgtcgcccgcgagacttcccatgctgatcggtagctattcaacctcccttgtcgtgatttccctgtgcgtggccatcctggcgtcctacaccgccttggaccttgccgggcgtatcgcaaccgccaaggggcgggctgtttacctatggattactggcggcgcagtggcgatgggcatcggcatctggtccatgcactttatcgggatgctggccctgcgcctgccgtttgccctgggctttgacgtagccattaccctgttttcgctgttgatcgccgtgctatccagcgggtttgcgttatggctggtcagccagccacgcttaccggcctggcaactggcatttggcgcgctggtgatgggcgccggtatcgccagcatgcactacaccggcatggccgcgatgcgcatgacacccggcattgattacgccccgaccttgttcggcgcttcgttggtgatcgcggtggtggcgtccggcgccgccctgtggattgccttcaacctacggggcaacacaccttttgtacggctggcacggggtggcgccgccgtggtgatgggcgtggctatcgtggggatgcactacaccgggatggctgcggcgcgctttgccgatggcagcttctgcggcgccgccttgaccggcttgagcggcaagggcctggataacctggtcttggtcacttcgctggcggtgctggtcattgcgctcttgacctcggtgctggatgcgcggctggaagcgcgcaccgccgtactcgccgattccctgaccctggccaatcaggaacttacccacctggccctgcatgacatgctcaccggcctgcccaatcgcacgttgttggctgatcgcattcaacaaggcatccaggcggtgaacgagcggggcggttgctttgccttgatgtttatcgacctggatggtttcaagccggtcaacgatgcctttggccatcacctgggcgaccagttgctgcgcgaggtcggcttgcgcttgcgcgaggatttgcgcagccaggacaccctggcccgcatcggcggtgatgagtttgtgttgctggtgcagctcacccagcccgacgatgccatgggcttggccgagcgccaggtgagcctgatcaatcgcaccttcacggtggccgaacatgagttgcagatttcggcgagcatcggtatcgccatgttcccgggcaacggtaataacccccaggaactgctgatgaacgccgacgcggcgatgtatcacgccaagggcatgggcaagaacggctacagcttcttcgatgtgtcgatgaacaccaatgcgcgcaaacaactgcaattgctgcaggatctgcgcaatgccctggagcaggggcagtttcgtttgcattaccaacccaagttcgacgccgtcagtggtcttgccgtaggggccgaggcgctgttgcgctgggagcatccgcaacagggcttgctgatgcccgctacgtttatcgcactggcggagaaaaccgggctgatcattcccatcggcgagtgggtactcgatgaagcctgtcgccagatgcgcctgtggtacgcccagggttatgagagctggcgcatcgccgtcaacctgtcggcgttgcagttctgccacgccggcttggtcaatagcgtagcggccgcgctggagcgtcatcaattgccggccaacagcctcacgctggaaatcaccgagaccaccgccatgagcgatgccgacgcgagcatgacggtattgcagcagctctcggatatgggcgtggacctgtccatcgatgactttggcaccggttactccagcctgatgtacctcaagcgcctgccggccaacgagttgaagatcgaccgtggttttgtgcgtgatctggaacacgacagcgacgacgcggccatcgtctcggccatcgtggccctgggccaggccctgggcctgcgaattgtcgctgaaggcgtggagaccgatatgcagcaggacttcctcacccgcctgggatgtgacgccttgcaaggtttcttgttggggcacccgttgccagccgacagcttcatggccaatatccggcgcaccgaagagccggtagcgcctgacaaaagcattaagtgaaaggtattcttggatccaaccttaaacatccggttgaatcaggaggccgcagccatggacaaagtcgtcatcatcacggggggcagccgtggcattggcgcccagacagcattgctcgccgctcgccagggctatcgcatctgcatcaactaccaggcggatgaagacgcggcccaccgtgtacttgaacaggtgcgtgcgttgggcgcccaggcgattgccgtgcgggccgatgtcagcaacgaggatgaagtgatcggcctgttcaatcgcgttgatgcggaattgggtcgggtcactgcgctggtcaacaacgctggcaccgtggggcacaagtcacgggtcgatgagatgtccgagtttcgtatcctcaaaatcctcaagaccaatgtgctgggcccgatcctgtgtgccaagcacgcggtgttgcgcatgtcgccccgccatggcgggcagggcggcagtatcgtcaacgtgtcgtcggtggcggcgcggctgggctcgccgggtgagtatgttgactacgctgcctccaagggggcgctggataccttcactatcggcctatcgaaagaggtcgcaggtgagggcatccgtgtcaacgcggtacgccctggctatatctttaccgattttcatgctttgagcggcgacccggaccgggtcagcaagctggagtccggaatcccgatggcgcgtggcgggcgcccggatgaagtggcggaggcgattatctggttactgtcggacaaggcgtcgtattccaccggaacgttcattgacctgggcggtggccgttaaggcgctggccgatcaggtccgcagcgtgcgcagcaccccgtagccgtaccaggagaattgccggagcagatcggcttcggagtgcttcaccacgcgatagccacagttggaaaaaccctcgatatggccattgcggctatcgctgccattgagggttcgatcatcgacgttatcgagaaagcgcagcactttatccagatcgtaggccgcattggctcgagctttggggtctggattagcgttagtccagtcgccgacctgtcgcttgaggtcatcgacgacctgatagaaatcgcagcctttgaggaagttttttgtcacgctactgtgctcgatgatcgcctctgccgagcgatgatcaccggcagggcgtccgttcgggcctgtcatctggcgcacctgctgttgttccgcccagcgcatatagtggcgagggacgggaaaaggcctcaggttgcgaggcacacgtgttggcagcgagcagtttttccaggtgatcacgcaggtctcgttattcggtctgtggaggcctctgagtcgttaagacgcgacggtaggttccatttagaacgagcgcacaatccgccccaatgtctccatggccttctccgaggcttcgttccacgggctgccatagttcaagcgtatgcagtttctgaagcgctgggtcgcggaaaagatcggccccggcgcaatgctgatgccctgggccagggccatctggaacagtttcagcgagtcggtctgctccggcaattccaaccacagaaaatagcctcctgccggctggctgacccgggtttgcgccggaaagtagcgggcgatggccgccagcatggcgctttgctgttcttccagggcgtagcgcagtttgcgcaggtgccggtcatagccgccgtgttgcaggtaatcggcaatcgccgcctgggccggcatcgatgggcacagtgaggtcatcagtttcaaccgctcgaccttctgcgcgaagcgcccggcggcgacccagcccacgcggtaacccggtgccaggctcttggcaaaagagccgcagtgcatcaccagcccttcggtatcgaaggccttggccggctttggggcttgttgcccgtaatacagctcggcatatacatcatcttcgattaacggcacttgatggctgcgcaacagctccaccagcgcctgttttttctcctcaggcagcgtggcgcccatggggttctggaagctggtcatggtccagcaagccttgatcggatagcgctcaaggctttgggccaaggcgttcaggtcgataccgtcacgcggatgcaccggaatctccacggccttgagcttcaagcgttcaagcacttgcaagcaggcgtagaacgccggcgcttcgatggcgaccaggtcgcccggttcggtcacggcctgcaggcacaggttgagcgcttcgagggcgccgttggtgatcagcagctcctccattggcagcatcaggccgccgaccatatagcgcagggcaatctgccggcgcagttgcgggttgcctggcgacatgtcggtgaccaccaggcgtgggtccatttcgcggctggcactggccagggagcgagccaggcgcggcagcgggaacagcatggggctggggaaggccgagccgaagggcacggtgttggggtctttgatcgagtccagtaccgagaacaccagctcgctcacgcccacatcggtggactcatgcacctgctcactcaccaccggttcggaaaacgggctgggcgcatgggtgttgacgaagtagccagaacgcgggcgggcgcgaatcaggccacgacgctccagcaagtaataggcctggaacacggtggacgggctgacgccgtaggcctggctggcatagcgcaccgatggcacgcgctggccggggccgaggacgccggagcggatcagttctgcgatgtcgtcggcgaatttttcgtagcgtttcatggcggcctaatttgctttttgaatgtgtacgcaaggcgaactgtgggagctggcttgcctgcaaaggcggtgtgtcagtcagtgcatctgttactgcactaccgttttcgcaggcaagccagctcccacatttgatctttattgttgatgaaatatcagcgattcaagggcgcaacgaagcggctgtcggcagcggtataaatccacggctcatccacatccgtcactttaaaacggatagtttgggaactgctggccggtgtgtccgccagcaacgccaccgacaccggcacatcgacaatttccccgggcgccaggctgacctgggtcttgccttgcaactggaagccctcggcgtccaccagttccaggcggtagtcctggcgctgctgggtcttgttgatcaccttgaggctgtagatgttctcgatcaagccctggctgttttcgcggaacataccacggtccttggtcacatccagcgacaccatcggccgttcaatcagcgccaccaccaatgccgcgatcatcaccaccagcacggcactgtagccgatcaggcgcggccgcagcaggtgagtcttgccgccctgcaattgatgctcactggtgtaactgaccaaaccacgggcatagcccattttgtccatgatcgaatcacaggcgtcgatacaggctgcgcagccgatgcattccatttgcaggccgtcgcggatgtcgatgccggtggggcatacctgcacgcacagttggcagtcgatgcaatcgcccaggccaacttcggctggctgcacgtcacgtttacgcgggccacgctgctcgccacgggcggcgtcgtaggaaatggtcagggtgtctttatcaaacatcacgctctggaaccgtgcataggggcacatgtgcatgcacacggcttcgcgcagccaaccggcattgaggtaggtggcacccgtgaaaaacaacacccaaaacaggctcacaccgcccatctgccacgtcagcaattcagcggccaagggacggatgggggtgaaatagcccacaaacgtcagcccggtcaacacgctgatgcccagccacatcgtgtgtttggccgagcggcgtgccagcttattcaggctccagggtgcggcctgcagtttgatgcgctggttgcgttcaccctcggtgaccttttcacaccacatgaacagccaggtgaacgagctttgcgggcaggtgtagccgcaccagacgcggccggcaaacaccgtgattgcaaagaggccgaaggcacagatgatcaacagcgctgaaagcaggatgaagtcctgaggccagaacgtcgcaccaaagatgtgaaatttgctctcggccaggtcccacagtacggcttggcgcccacgccagttcagccacacggtgccgaaaaaagccaggaacagcaggccggcaccgcccacgcgcaaggtgcgaaacaggccggtaaaactgcgggtatggatcaggttgtcgctggatgtggccttcaccttctttgggtgaatgggctcaaaggtttccacggttgggattcgttcgctcatggtcgttcgctcatcagcctccatcaggccgatgaactatgggcgacgggctgtttgcataacagactcaggtggaatgataaaaagcggatcagataggtttggcgcgttcgtgtgcgtcaatgtgctgcacccccagggcctaggggtgcagggagtcagtgggttcgatgatacagatcaattaaattaccgaaccaggtgctgccgccttcacatggttacggctgtccgtggccccttcaaccgtaagtttgtcggcctcagattcagtgatgtatatccgtttgccagccaagtccacacaggacatggctttgtcattgtcggtaaggatggtcacccgggtggctggcaggctttgttcctggccgttgtcgtcgagtgtgaagtagcacagatgattttcgatgcgtacggtcatgacaatctccgttttgtgggctatgcagcgttaggcggccgccatgcgggccggttccaggcaactgactggcggtctgcgctgtccatcctttatctatccataataaaaaggagcgcatccatggacgcctggtggcatctggtgtggcaaaccctgcaagccgaattcgcggacatcggcgatgcccggcaactcacccaagtgaccgtgcgcctgctgatcgcggcgatcctcggcggcatcctggggtttgagcgtgaacacaagggcaaggcggccggggtgcgtactcatatgctggtggcgctgggcgccgcgctgttcgtgctggtgccgcagatgtccggcaaccaggcagatgccatgagccgtgtggttcaaggggtgattgcgggcattggcttcctcggcgctggcaccatcctcaagggcaaggaagatgaagagggccagcatgtgaagggtctgaccacggcggcggggttgtggatgaccgccgccattggcgtggcggcgggcatgggccgtgaatcgacagcggtactcagtacgctgctggcgttggtggtattcagtgtgatgccccgggtcgtcaagctgctggacaaggatgagtgacagggtcaggtggtgaggttgctgtacctgacctcaccgaagactttcaccacgaagggcggctctcccgggttgccggaaatcattaccacgctcgtattattggccgggttgtagtgaatctgcacttcgccactggcgcctgagaaattttctaccgatttcaaaggtttgttgccgagttgcttgcgaatggccgttacatcgagcttgtctctgttgtggtcaaaatccatcacctccttaggcgcgtcgaagttcgagtcgcggatactgtggaaggtgaaggtctgaccaatgccaatcctggaatcgttgctgttgctggcggttttgaggctgtctgcctcagccgatgaattgtccggttgcggggtcggctcgccgaggtccacttccttgccgatctcgaagagggccgaggcgagtggcgtactctggcgcactcgctgttgggcataggattcctcaacgcgtagctcatctaagacttgcattgattggctgaaactctcctcggggtcagaactggcggtgcgggcgcggatctcttgagggctcaagcccggtcgctcgatatgcgaggattgctcatgaatcatctgcaggcttgactgacctagacgctccttcactttggtaatcagtttgcgcgcttcgtctgcatccgggccatgcagcatcgacttgacattttccttgcttaacaggctaccgatctcggccaacttctgggcgctctcctgcgagtttggctcgcgcagcatctgggtaatactctcccggctggcgagcgcacgaagttgggcgagccggggggcgtctgcaccgggcgcctgcggctccacgtctgtagtcggtgcagtggtgggcgcagttgaggcttgctcctcgggcgcatcggtaccgggcgcctgcagtttttggtttgtcgaggggctagggttggacggggtagaagcttgcggcgccctggggaggtccgatggatgcctgtcaggctctttcctgcgcatgattccgctggggccggcccttaataaatcgttcagtttctgtcgatcatcgctgaccggacgttgttgtaggccatgcatatcgggcgttggtggcagtagcgaaatggacatagaaggtactcgcgttacggacggtatagtctgcggccagcaaaaaggcgggtcagcgcacgagtaatgaatctatcttggccttcgagggggtgatctcggtgatgtctgtaaagcgagtgggaaaaatcagcatcgcttgcccgcgatatttggttcgcaagcaagcgtttgcgggcctgtaaatcagacgataacgggcggcatcgttgcggggggttcctgcacgggcggtggctcgttttcagggggctcttgttcaggaacgggttggggttctgtgggcggcagcgggggctcgtcgatatttggatcttcggattcagggggtatcgggatattcattggtatggcctcgtttgtgctttgctctatcggtggacccttgcctgcgggaaatgattcccgcccagtggcggtatatccacctgaacttttgaacagcgcccaggctcggaccttatacggccctgctcagggagagcgtcgccgtttctgaattcggatcaagccaagagcgtccacagggcgtaaggggaagatgctcgatgactgctgaaacactggttccagaagactccgtgctgccgctgtcccaggcgctgctgttacccaggatcgcgatcgaaagcaccatgccggtcatcgacaacggtgagtttgccgtcaaggcggtggtgggtcagcgggtccatgtgaccagcaaagtgttcgccgatggccacgataaactggcggtgttgatccgctggcgcgcgctgggagatgaaagctggcacagcgtggtcatgctggatatcggcaacaatggttgggagggggcgtttaccgtcgcctgccaaggccgccatgagtactgcatcgaagcctggatcgacacctttgccagcttctgttacgaactgcgcaagaagcatgaagctggcgtgccggtcagcctggagttgcaggagggccgcagcctggtgttgcaggccgccgaacgcagtgacaatgaactgcgtgaccgcttgatgttgttgcaccatgagctctccggcctgctggaaaccgagcaggtggcgttattcctgcacgaagacagtgcacacctgatgacccaggccgaccatcgggcctatttgagcgtcagccccgcgtacccgattgacgtggagcgtgaggccgcacaatttgccagctggtacgagctgtttccgcgctcgatcaccgacgatcctgcacggcacggcacgtttaacgacgtccacgcacgcttgccgatgatccatgacatgggctttgacgtgctgtacttcccgccgatccaccccattggccgtagccaccgcaagggcaagaacaactcgctcatcgccggccccgatgatcccggcagcccctatgccatcggcagtgaggcgggcggtcacgaggcgatccacccgcagttgggcacgcgcgatgattttcgccggttggtccaggccgctgccgaccacggcctggaaatcgccctggacttcgcgatccagtgctcccaggaccatccatggctcaaggagcatccgggctggttcaactggcgcccggacggcacgatcaagtacgcggaaaacccaccgaaaaaataccaggacatcgttaacgtcgatttctacgcggccgacgccatcccgagtctgtggaccgaactgcgcgatatcgtggtgggctgggtgcaagagggcgtgaagacctttcgcgtcgacaacccgcacaccaagccgctgccgttctggcaatggctgatcagcgatgtgcgtgccaagtaccctgaggtgatcttcctcgccgaagccttcaccaccccggcgatgatggcgcgcctgggcaaggtcggctattcccagagctacacctatttcacctggcgcaacaccaaggctgagctgagcgagtacctcacccaactgaaccaatcgccttggcgtgagtgctaccgcccgaacttcttcgtcaatacgccggacatcaacccgggtttcctgcatgaatccggccgtgcaggcttcctgatccgcgctgcgctggccaccatgggctcgggcttgtgggggatgtattcaggctttgagttgtgcgaagccgcgccggtgccgggcaaagaggaatacctggactcggagaagtacgagatacgcccccgcgacttcaccgcgcccggcaacatcatcgccgagatcgcccagctcaaccgcatccgtcgtcagaacccggcgttgcaaacccacctggggctcaagctctacaacgcctggaacgacaacatcctgtatttcggcaagcgcagcgaagacggcagcaatttcattctggtcgccgtcaacctcgacccgcacaacgcccaggaagcccacttcgaattgccactgtgggagatgggcttgcccgacgatgcccagacccagggcgaagacttgatgaacggccaccgctggacctggtacggcaagacccaatggacccggctggagccacagatgccgttcggcatctggcgcatcagcacatcctgagtgctcgttcccacgctctgcgtgggaacgcctcacgtgacgctctgcgtgggaacgcctcacgtgacgctctgcgtgggaatgcctcacttgacgctctgcgtcgcgcttgggacgcggagcgtccggggctgcattcccacgcggagcgtgggaacgatcctcgagaactttgtattttcaggagtttgcaatggccaagaaacccaaggcagccacctttatcaaagacccgctctggtacaaagacgcggtgatctaccaggttcacgtcaaatcctatttcgactccaacaacgacggcattggcgactttgccgggctgatcgccaaacttgactacatcgctgacctgggcgtgaacaccatctggctgctgccgttctacccctcgccgcgccgtgatgacggctacgacattgccgaataccgcggcgtgcacagcgactacgggacgatggccgacgccaagcgctttattgcccaggcccaccaacgcgggctgcgggtgatcactgaactggtgatcaaccacacctccgaccagcacccctggttccagcgtgcgcgcaaggccaaaccaggctcggcggcacgggacttctacgtgtggtcggacgatgaccagaaatacgacggcacacgcattattttcctcgacaccgaaaagtccaactggacctgggacccggtggccggccagtacttctggcaccgcttttactcgcaccaaccggacctcaacttcgataacccgcaggtcatgaaagcggtgctgtcggtgatgcgctattggctcgacctgggcatcgacggcctgcgcctggacgccatcccctacctgatcgaacgggacggcaccaacaacgaaaacctggccgaaacccacgacgtcctcaagcagatccgcgccgagatcgatgcccattaccccgaccgcatgctgctggccgaagccaaccaatggccggaagacacgcagctgtactttggcgacagaaagggcgacgacggcgatgaatgccacatggcgtttcacttcccgctgatgccgcgcatgtacatggcgttggcccaggaagatcgcttccccatcaccgacattctacgccagaccccggagattcccgccaactgccagtgggcaattttcctgcgcaaccatgatgagctgaccctggaaatggtcaccgacaaagagcgcgactacctgtggaactactacgccgcagaccgccgcgcccgtatcaacctgggcattcggcgacgcctggcgccgctggtggagcgcgatcgtcggcgggtggaattgctcaacagccttttgctgtcgatgccgggcacgccgaccttgtactacggcgatgaaatcggcatgggcgacaacatctacctgggcgaccgtgacggcgtgcgcacgccgatgcaatggtccatcgaccgcaatggcgggttttcccgtgccgacccggccagcctggtactgccgccgatcatggacccgcaatacggctaccagtcggtcaacgtcgagacccaggcccaggacccgcattcattgctcaactggacccggcgcatgctcgcagtgcgcaagcagtccaaggcgtttggtcgtggcagcttgaaaatgctctcgccgactaaccggcgcatcctggcttacacccgtgaatacaccggtgaagacggccacaccgagatcatcctgtgcgtggccaacgtgtcgcgcagcgcccaggcggcagagctggacctgtcggcctttgccggcatggtgccggtggagatgcttggcggtaatgccttcccgcccatcggccagctgaatttcctgctgaccctggcgccctatggtttctattggttcgtgctggcagcggaaaaccagatgcccagctggcatgtggaaccggcgcaaagcatgcccgacttcaccactttggtactgaaaaaacgcatggaagagctactcgaagaaccttgccgcaccagcctggaacatacgtcactgcccgcctggctgcccaagcggcgctggtttgccggcaaagatacggcaatcgacacggtgcacatcgcatatggcgtgcgttttggcgacccgcagcatccggtgttgctcagtgagatcgaagtgaccagtgccggccaggtcagccgctaccaactgcccttgggcttccttggcgaagaccagttcaccagcgccttgccccagcaattggcgttggcccgagtgcgacgcacccgccaggtaggtttggtgaccgatgccttcagccttgagcattttatccttgaggtgatccaggccatgcaggccggcaccgtgctcaatacccctgacggcgatctgcgattcgaggccactcaacacttggccgcattgcaactgacccgtgaatcgccggtgcgttacttgtccgccgagcagtccaacagctcggtggtggtcggtgagagtctggtgctcaagctgattcgcaaagtcagcgccggcgtgcacccggagctggaaatgagtgcgtacctgaccgccgctggctacccgaacatctcgccgctgctgggctttatgagccgccaggacgggcagggacaggacaacttgctgatgattgcccagggttacttgagcaatcagggcgatgcctggagctggacccagaacaacctggagcgggcgatccgcgatgagctggccgacgcgatctctgaacaggaacagcattacaacgccctcggggaactggcagattttgccggtttgctcggtcagcgcctgggtgaaatgcacctggtgctgggtgcgccaacggccgacaaggccttcaaacccgaacccaccacaatcaaagacacccaagcctgggccaaggatgtcggcgcccagatcgaccgtgccttgcagttgctcaagcttaatcaaagccagttgaaccccgccgaccaggcgttggtcagtgaattactggcgcagaaaaaagccatcgcggcgcatgtccaggcgttggccaaagccacggcgggcggattgcgcattcgcgtccacggtgacttgcacctgggccaggtattggtggtcaagggcgatgcctacttgatcgacttcgagggcgaaccggcgcgaccgctgcatgagcggcgcggcaaacacagcccttataaagatgtgagcggtgtgctgcgttcctttgattatgccgcggccatggcgctgaatgtacaaggggtggatcacacgccagaagcgaacgctgcgcgcaaacgcgtgaccgaccgctacctgaatgaagcccgcgtagcatttacccaggcttaccaggccgctgcgtctacactggcgcatgactggcaggatgccaacggccaagacgcagcgctgaccttgttcagcttggaaaaggccgcgtacgaagtggcctacgaagcagaaaaccgcccgacctggctgccggtgcccctgcaagggctgcacggcttgttgagcgggctgacacctatatctaaacctgtacgcggtggggagacgtcatgagttttacacagagagaaccgctgcagcccaagttgactgcattgccggcgtccaaggacgtcgatgcgctggtgcgcgccgagcaccccgaccccttttcgatcctggggccccatgatgacgagcagggcggccagtttatccgtgcgttcctgcccgaggccctgagtgtccaggtactggcgcgtgacacaggcgagccgtttggcagcctcgatgccacccaggtgccaggcctgtttattgggcacttcagcactcgccagccctacctgctgaaaatccagtgggccggcggtgagcagatcaccgaagacccttacagcttcagccaattgctgctgggggagatggacctgtacctgtttgccgaaggcaatcatcgtgacctgggcaactgcctgggggcgcaggtggtcagcgtcgatggcgtgcaaggcgtgcgctttgccgtctgggcgccgaacgcacggcgggtttcggtggtgggcgacttcaatatctgggacgggcgccgtcatccgatgcgcctgcgccatccctcgggcgtgtgggaaatcttcatcccgcgcctgcagccgggcgcggcttataagtacgaaattctcggcgcccacggcattttgccgctcaaggccgaccccgtggcgctggccacccaactgccgccggacaccgcctcgaaagttgccgcacctttgcaagtggattggcaggaccatgagtggatgcaatcgcggggcgacaagcagaaatccaccgcgccgttgtcgatctacgagctgcatgtggggtcctggcagtgcgagttggatgaggccggtgaagtggcccgtcaatacggttggcgcgaactggccgagcgccttattccttacgtacaacaattgggcttcacccatatcgaactgatgccgatcatggagcaccccttcggtggctcttggggctatcaggcattatcccagtttgcccccagcgcgcgctttggctcgccggaagacttcgcctggttcgtcaatgcctgccatcaggccgatatcggcgtgatcctcgactgggtgccggcgcatttccccaccgatacccacggcctggcgcaatttgacggtaccgcactgtacgaatacgccaaccccctggaaggctttcaccaggactgggacacgctgatctacaacctgggccgcaccgaggtccacggtttcatgctcgcgtcggctttgcattggctcaagcatttccatgtggacggcctgcgcgtggacgccgtggcctccatgctgtatcgcgattattcgcgcaaggccggtgaatgggtgcccaaccgccatggcggtcgcgagaacctggaagccatcgacttcttgcggcacctgaacgacgtggtcgcccttgaagcgccgggcgccttggtgattgccgaggagtccacagcctggcccggcgtcagccagccgacccaacagggtggcctgggcttcaactacaaatggaacatgggctggatgcacgactccctgcattacattcagcaagacccggtgtaccgcgcccatcatcacaacgagctgagtttcgggttggtgtatgcctggtccgagcgcttcatcctgccgatttcccatgatgaggtggtacacggcaagcactcgctgatcgacaagatgcccggcgaccgctggcagaaatttgccaacctgcgcgcctatctcagtttcatgtggatgcaccccggcaagaagctgctgttcatgggctgcgaatttggccaatggcgcgagtggaaccacgaccagcaactggattggtatttgctgcaataccccgagcaccgtggggtgcagaagctggttggcgacctgaaccgcctgtaccgcgaagaaccggcgttgcacgaacaggacgatgcgccccagggcttccaatggctgatcggtgatgacgcgatcaacagcgtctacgcctggctgcgctggagcaagggtggccagccggtgttggtggttgccaacttcaccccggtgccccgtgaaggctacgcagtcggtgtgccgtttggcgggcgctggagtgaggtgatcaacagtgatgccgatacctacgccggctccaattacggcaatggcggcgcggtgtttacccaggatgagccgcgccatgggcaaccggtgtcgttgtcgttgaacctgccgcccctgggcgtgctgattttgcgacctcaagagcctgaaacgctctagcgcggcgtatgccgctgttcggcttgctggcaaggtgccacaatggcgcctttgccgtcgccggtcaaacaggccaaccccatgaataaccttgggcaagatcagggtcacctcatcgaagagcaggtgcgaaccgaccgtttgcaccagctgtttcgtcaatcattctcggcgatcttcggcagctacctgggcgccgtcatgctctgctggctgtgctgggatcggttcgatcatcaggtcatcctggtgtggttggtactgttggcgggctcgtcattggtgcgcctgcatctgttcgtgcaatggtttcgctgccctgacgcggcgcgcacgcccgcccgttgggaacgccgctactgggtcacgctgatgctgtcggcgggtatctggggcggcggggcgctggcggtgatgccggtcgatgaccgcttatcccaggtgctggtgatgctgtttaccgtgggcatgtcggtcagcgcggtgtcctgttattcagcctatcgctacatgacgctgggctccatggcgctggtgttgcttccctgtacggtatggatgctgctccagccctcaccaatgcaagtcggcgtggcgctggcggtgttggtgtttgcctcgtttgtggtcggtgcgacgcgcaagctctccgatgccctggaaaaagcctttcgcctgacgaggcaaatggagcgcgctcatcacatttccacccgcgccgcccagaccgatgaactgaccgggctgatgaaccgtcgggctttttacgagcaagcccagttgctttacgcccagtgcctgcgcgagcagcaaccgctgtgtgcgttgatgatggacatggaccacttcaaagccatcaatgacacctacggccaccaagccggtgaccaggtgttgcgccagattggcgcggtgatcagcgcatcctttcgccagaccgatatctacggtcgcctgggaggcgaggagtttgcggtgttgctgcccaatacctcattggagaccgcgcgcggcattgccgagcagttgatccagaaaattggtgacttgcccgccgacccggtacagggggtgagcgccagcctgggcgtggcatccacccacgctcagcatctggacttgaacggcttgatgaacagcgccgacaaggccctgtaccaggccaaggcatcgggccgcaatcaggtggcggttgtcgactgatccttgctcatcgcctttgccagcactcgcgcaacctggtcggcggagtagggcttggcgaggaactcaaagccttcatagccgctgtccgccagttcctcgctgtagccggagacgagtaccacgggcaggtccgggcggcgctggcgcagtagcttggccatggccacgccggtcatgccgggcatcaccacgtcggagaaaatcgcatcgaacccctggacgtctgtgccggcgaggttcagcgcctgttcggcattggtcgcccacgtggtctggtaacccaggtccttgaggatctggctggcgaagcgtcctacctcaaggttgtcctcgacgatcagcacgtgctgatgagcagcctcttgcggcgctggcaagtctgtatgcgggtcttgatccggcgccgcttcgccttcgacctgcggcaggtacaaggtaaacaccgtaccctggccaagggtgctggccacatcgatattgccgcctgactgcttggcaaagccgaatacctgcgacaggccaaggcccgtgcctttgcccacggccttggtggtgaagaacggctcgaagatgcgttcgaaggtatcgctgggaatcccggtgccggtatcggccagagaaatggcgatgtagggcatgcacgactcggcatccccgcggatacgtggcagcgtttgctgcccggcgactttcagggtcagggtaccctggccgtccatcgcatcgcgggcgttgagggcgatgttgatcagcgcggtttcgaactggctggggtcgatgcgtgcatagcagggccgatcgggcaattgcacctgcacatgaatgcgtgcgccggtgacgctttcgagcatctcgccgatgttctgcacgcgctggccgacatcgaacacctgcgggttcaatggttggcgacgggcaaaagcgagcagttggctggtgagcttgctggcccgctccaccgtgtcggataccgcgcacatataacgttgccgacgctcttcggacaggcccggttggcgcaggaaatccacggatgagcggataatggtcagcaggttattgaagtcatgggcgacgccaccggtcagttggccgatggcctcaagtttttgtgactggcgcagtgcagcttcggcttcggccagcgcacgggtacgctcattcacgcgctgctccaggctggcattgagttccgcataggcggccaggcccttacgcacggcggcgtcggcacgcacgcgctcgatatgcgcccatgaacgttcggtgacttcgcccaacagcgcgatgtcgtaggacgaccaaaaacgcggcactttgtcgtgtacggccatcagtgcggtgagccgcccgtctttgatcaagggcatgcaaatggtggccgtcacaccgagtgcctggaagctcgcggcgtcatggggcggcagctcgatcagattattgcgtatcaccagtggctcgccggcacgcaggcagttgaccgcgcattcgccaaacgccgccaggctgtaatggccgatgatgctcggcgagccttgcgccgaccagtcgcctcgaatggtaaagccatcttcatcctcgtccatgttggcgtaggcacagatggacacctgcagatgttcggccagcaggcgagtcgtagacgtcaggatggtttcggcgtcggtagcgttggtcacgctattgctaatggcgtccagcacttcaagacgacgggcgaggaacaccgtggcagtggtttcggtcaccgtgtcgagcaaaccgaccactacaccttgggcattgcgaatcgggctgtagcagaaggtgaaataggcttgttccggcgcttcgttgcgttggatcaacagcgggaagttttcgatataggtggcgtgcccatcgaacgcggcgtcggcgatagggctgatatcgtcccacacctcgtgccagatctcgttgaacgggcggcccaaggcgtcgggtttgctacccaggatcggcgtgaacgcgtcgttgtagagggtaatcaactgaggcccccagacgatggcctgggggaaactcgacgcgaagcacagcgcaacggttgtcttcaacacatcgggccagtgttcaagtggccccaggggcgtattggcccaatcatgctgacgaacccgctctgccatttcgctgctgccttgcagccaattcatcattgggttcacaccttgcttgccacgtattgtttagctttgaagagcccgaccgactagcaacagaccggaatgaccgcattcagttcagcgcgattatctccctgatagcactttgatttcattgtctatttgcacgccgtcattgttggccgggttgggccggcgcccaaccttcattgcgtaccgaataaccccgtccaatagatgcccgcgtcactcttggggtccatcgcgtaggcggcacccaagtcgcgaaattgcgggttcatcagggtggcgcagtggccggggctggcgagccaaccgtcgacgaccttgcgcggcgtgtcgaggccggcggcgatggtttcgccgatgttcttcgcgatatacccggccagttcggcgcggtcaccgggcgtacgcccgtcgtggtccaggtggtcgaagaagttgccgttggccatgttgcgcgtgtggctgttggccgcgctggccagcgtgtcgttccacgacagcggtgtggtcgcggtgaacgcctgggtgccgcactggcgtggctcggcacgcgcggtgttgatcaagtcgagcagttttctgccttcggtttgccaatcgcccaggccactggtaaccagcgggcgagccagcacgatgcgccagtcctggccgctgttgctgacgccgatatcgacaaattgcggatcgagcactacgcggcagaagctctcgcgtaccgctttcatcgcggcctcggcatctttgggcccggacaggctgatagcctgcacattcaccatggggtacgcagcgcgcgccagcgactgctgcaaatcgccgacattggacgccggcaataccagccgtgtgtcgctggtcagcggcggcagctcctgggaaccctggtcaccgcagcgttgcacctggctgcggtattggttgatctgttggactaactgactttcttcattcgccatcgcgctggcgcagaacaccgtagtggcggccagcgtcgtaagacccatcatcaatgacagaacgcgcatggacgttacccttgagcttgaaagtgcccatgatgcgcgatccaggtgcatccatgcacccgttggtccgaactttttttgctcagttcttgaatgtcgagtgtttcgcgccctgatcgcagagggcaaacaccaccaccaacaacgcagaaatcgcgaggatcaccaccacgccatcggtggagtgggtggccgaggccgctaccatcgacagcgcgcccagcggtgccaggccaccggcaatggcggtgccgatctcccgcccggtgccaaagcccgatgagcgcgtttgcgtcgggaactgccggctcaggaacgaaccctggggggcgaacatcatcggcgcgaggattccggtgcccaccccgatggcgaggtaaatcatcaggctttcaccactgttgagcagggccaggaacgggtaggcgaacaacagcgagcatagcccgccgagcatcaacacggtcttgctgctccacttgtcacacagccagccgaagcagggcacggcgacgatggccaccaggctggcgatggtcaccgacagggaggtgacatgcacatccacccctttgaattgggtcaggtaggccagggaaaaagtcttgaagatgtagctcagggcgttgtagccaatcgcgacaaaaaacaccacggcgaggcccttgaggtcgttcttgaacaaggctttgaggggcgatggcttggccttggctttttccttgctcagctcctcgaactgcggggtttccggaatgctgttgcgcacccacaggccgacgcccaccagcacgatgctgcagataaacggaatacgccagccgccggccagcaggaactcgttgccgttgatggtcagcaggtagatggtcagtgaggacagcaacaggcccaggttcagtcccaatgccggccaggcgccctggctgccacgcttgccttgggaggcgtgttcgtaggaggtgaccgccgcccccgacagctcggcacccgcgcccaggccctggatgatgcggataaacaccagcaggatcggggcccagatgccgatggaggcgtagctggggatcaagccgatcaaggtggtgcacacgcccatcaggcagaaggtcagcaccagcacttgcttgcgcccgaacttgtcgcccaggtagccaaacaggatgccgccgaaggggcgggcgataaagccgatggcaaaggtcgaaaaggccattagcgtggcagtcttcgggtcgctgttatcgaagaagatcttcgaaaacacaatcgccgccatggtggcgtacaggtaaaagtcgtaccactccagcatcgagccgaagatggtggcggcggctactttgcgtaggcgcttgcgggtttgttcgggcgtttcggtaccggggatggaggcggatgccgacatgctggacttccttctgggtctttgtagttattgttgggtgaacgggcggtgcggtcttactgggggtggaacaggcggtcggcgatcatcgcgccgatgggcatggctgaggtggcggccggcgagggcgcattgcacacatgcagcattcgtgaggtttgggcgaacagaaagtcgtgcaccaggctgccgtcacgcatcaccgcctgggcacggataccggcctcgtagggcagcaggtcatcgagggtcagggacgggcagtacttgcggcactgctccaggtagccggacttgaataacgagttcttcatttcggtggtgccggaaccgaggttttgccacagggttttccagaatcccgggaagctggcgtactgcgccacgtcgcgccagttcaccgaaaacttgcggtagttctcgcggcccaggcccagcacagcattggggccgacggtgacgctgccgtcgatcatgcgggtcaggtgcacgccgaggaagggcagctgcgggtcggggatcggataaatcaggtggttgacgatgttgctcttggcggagggcaggcggaagtattcgccacgaaacgggatgatctgatggtcgatgcggatgccggccaggcgcgccaggcggtctgactgcaagccggcgcacaccaccaggtggcgggcctgccaggtctcgccctcggtgttgacggtgaccgtatcggtgtcttcgtggatggcggtgacggtgcgttccaggcagatctgcccaccgtggcgacgaatcacctgggccatggtctcgcacacctggcggtaatcgacaatcccggtggcatcgagaaacaagccgccgaggccgacgatgttcggttcacgctggcgcagctgttcggcattcaagcgctcgacctgcatgccattgagctgggcgcgggcgtacagcgcttccatgcgttgcatttccagggggcttgaagccaccagcagcttgccgcacacctcgaatttgatcccgtgttcacggcagaactgcttggtggcttcggcgcctcgcttgcacaaatcggccttgaggctaccgggcgcgtagtagatgccggcatggatcacgccgctgttgtggccggtctggtgcttggccagcaccgactctttttcgagaatcaccagcgacgcgccgggttggcgcttgagcagctccatggcggtggccaggccgacgatgccgccgccgataatgcaaaagtcatgaatcattgcaggggtacctaggctgtacatttcagtctgcttatcaggttgtcagactaatgtttttgttaaaaaaatggcgtgtccaaggacacgcttcacacaggttgcatcagttcgtggtcggcaattccagttgcaggcgctgcgctgcggcacgcaggtgcgcctcggcactggcagcagcgcgctgggcgtcgccgtcggcgatggcctggtagagctgttgatgttcttcggttgcatcggccgagccggtggcaaagcgcgacgccgagttctcccacgcggttttacgcgcactggccaactggctcctgaggaagtcatggaaggccacgaagtagtcattcttgctggcgtcggcaatggcgcggtggaattccacatcggccagggctgcggcttcaaagtcgtcgcggttgtcctgcatggcctgcaacgcgcttttcatgcgctgcaggtcggcgctgtcgcggcgctgggcggcaatcgaagcggcctgggtttcgatccacaggcgcacttcgaacatctgcgccaggtcaggtcgtcgcccgttgggctgcggaaaccgaaacaccgtgcccgcaggggtctgcgaaataaacgaacccagaccacggcgagcggtgagcacaccgtcggccttgagctgggcaatggcttcacgcaccacggagcggctgacgttgagctgttcggccaattgctgttcggtcggcaggcgcgactccggggccagttggccggattcgatttctgcgcgaatggcgctgacaacccgcacgacaagcgaatcggggcgctggagctcaagcatgggaaaaccttggtgatcaggttgtcagacaatagtcgttacgattttagcttgtcaatatttgtctgcttcgcgctgctcggcctttgcgcacgtttccaggcgatcagtgcggctatcagcagcaaacctgctgccatggcgaaggtggcgtgcaaaccggcagccaccgcctggggcgcggcgtggctgacatccggggtggcgcgggcgaacaccgcgccgagggccgatgcgccgaaaatcaggcccaggttgcgcgacagattcagcaggccggacaccgtgcctcggcgtgtcgcctgtacatcgctcatcaccgccgtgttgttggccgcctggaacaggctgtagccggccgtcaacacaatcagcgccgcgagataaacgccaagcccggacgcctgcgacagcaacaaggccccgcacagcatcacgcccaatcccatgagcgtcaggcgctggctgccgaggcgatcagtcaggtaacccgccggtacaccggtaaccgccgcgaccgcgggcccaacggccatggccaagcccatccaggcgggatcgaggcccaggccacgggacaggtagaacgggcctaccacaaacgtggccatgatcactgccgacaccatggcactcatggccaagccggcgcgcaacggcgcatcgcgcaggggcgcccagaatgtatcgcctggccaagcgtcgcggcggtcagcatccaccggcaaataacggtaggcgagggcggcagccacgcccgccaagggcaggccgatcagaaacagcgcgcgccaactccacaggctgagcaataccccgccgacactcggccccatggccgtgccgagtgccgacagggtgccgagcaagcccatgactcggccggtatttgctttcgtgacggtgtcacccaccatgcccagggtcatcgccatcatgatcgccgcgcccaggccctggaatgcccgtgcgccgatcagccaggacagggttggcgcggcggcacacccggcgcaggccagggcaaacaccagcaacccggccagcagcaagcgccggcgccccagacggtcgcccaggcgccccgcgctgacaatcacggcggtgatggccagcaggtaggccagcaccacccactgcacggcatgaaacgatgccccgaaggcgtgcgccaggctgggcaggccgacattggcaatgctggtgcccagggcggccagcaacatggacagcgacaaggcgaccaggccgccgcgtgtggaagtttgcatgcgcgtttccttgagtgaatgcacctgtcacaaatctacggcgtcgcctaacatggcggaagacgcatgggttgcaggttatagctgcgtccaacgcctgataaggagcccacatgcccgacctcaatttactcatcaccctggacgtgctgcttgccgaaggcagcgtcgctcgcgccgcccagcgcttgcgcctgagcccttcggccatgagccgggccttggcgcgtttgcgcgcggccacgggcgatccgttgctggtgcgtgcggggcgcggcctggtgccgacgccccgggcgttgcaactgcgcgagcaggtcagccaattggtgcaggacgcccacgccgtattgcgccccgcgcacaccctggatttgggtgaagtggtacgcaccttcaccttgcgcaccagtgaggagttcgtcgaacgcttcggccctgcattgctcgcgcgtatcgctcaggacgccccaggggtgcgcttgcgtttcgtgcacaagagcgacaagcacagtgcgttgctgcgcgacggtggtgtcgacctggaaaccggtgtggtcgatgtcggcgccagccccgaggtgctgacccaggcgctgtttcgtgaccgcctggtgggcgtggtgcgcgcgggccatcctctgagtcgcggccctttgagcgcagcgcgtttcgcccagggacaacacgtctatgtgtcgcggcgcgggcaggaccgtggccagatcgacgatgcccttgaggcgcaaggtctggttcggcaggtcagcatcgtggtcgccggtttcaacacggccatcgccctggcgcggggcaccgacctgatcgccagcgtgcctgagcgctatatcagcgtgccgcctcgaggcttgcactgctttgagctgccggtgacgttgccgccgtttaccgtggcgatgctgtggcacccgcgacaggacgccgacctggcccatcgctggctgcgcacctgtttgcgcgaggtgtgcgggccatgagcggcccgcaacaggtacaatcgccgctgccttgacgcgaaaccccaggaatttgcatgttcagccttacccgctacaccacaccgtgccccgaaccgatcaacagccagatcctgcagatggtggtggacaacctcaccgacatcagcagcgtggcgctggcaccgagcaacctgctctacaacatctaccagtacgccatcgggtttgaggtacacctgtaccttgaggcgttgaatggcgaaaagggcgttgcggtggagttggtcgtggcgatggaagacgacgcagtggtgggcttttgcctgtatctgccggtgaaggatgatccgcacgcctgtggcgtcgcgtttatggcggtgcaggccggctttcgtcgccagggtgtggcgcgcagcatgctggacgaggtgttggcgcgttatccccacgccgaactggcttgtgcggtagagaaggttgcggtgttcgaagccttggggttccaggtgcgcggtgcgcgtggcacccaggttgtgatgaacacccgcaactacggcaccgatgggctgatgggggttttggatgtggcctcgatctacagttcgctggaagtgcggcagatccacacctacctgctgcaaaaacacggcaagcgcgccatggtcgacgcagagaaacagcgcgatcggcacctggaccagttgacgcgcaaggcgcaactgttcgtccagggccgtctgcctacggcctgacgcgcctgaccatcccgaggatagtctccagcagctcctgctgagcttcctcgcggctgatctcgccattggccgccgcgtgggacagcgcttccgccgcgccgagcatggcgcgcaggccggcctgggaaatgctgccgccgtgggtgaagggcgacagcgcgtcccggcacttatcgaggaagatcgcctcgtattcacgcttggacgcttccaactccggcgaaccgctcaaggcggcaaccacgccgggaatttcccgaccttgcaacagcacacagtcgacatacgacgaggcgatgacccacgcgcggtcctcaagggtcgcgttgctggtggcgatggcattggcaaatacctggtcctggcgcgcgtcgaagtctgcatacagcgcggccagcaaccccgcacgcgtcgcgaagtggtcgtacaccaccggcttggtgacgcccgccaactcggccaggcggcccagggtcagggcgtcggtgccttcgtcacgcaccaattgccaggccacgtcgagtaactgacgcaggcgatcttcacgggacaaacgacgacgtggggcaggggattcactgcttgacatgcttatataccaaaagtaacttattcgacgtaacttactaaaagtagattaagccgaaacggagtcaaagtcatgcacgcattgatcgttgttgctcatcacgacccgcaatccctcactcatagtgtggccgccgaggtgggggcgggcttgagcgcctctggccacaccttcgaaatagccgaccttgccgctgaagggttcgacccacgctacagcgccgccgaccatcgggtgcaccgtacacgcgccacgccgccagccgacgtgttggccgaacaggcccgcatagaccgcgccgacgcgctggtgctggcgttccctatttactggtggtcgatgccggcgttgctcaagggctgggtcgaccgcgtattcgtcaatggctgggcgattgattacggccccgatacaccggtgcagaagaaactaaggcatgtgcaggtgcatctgctggccctgggtggggccgatgaaagtgcctttgagcgacacggttatgccaaggccatgaacacccagatcgactacggcatctttgattattgcggggcgcgggtactcacctccgcgttgttgctggactcggaaagtggcacggcccaggcgcacttgcacaaggcccgggcggtggggcaagagttgttcgagcgagaagcagtggcgggataattcagacgtcgcgaaacaggtcgtgggcgtcgagcaagcggtaggcaatctctgggttcttctccaggccacggcgaatggaggcggggatcgactggcgggtcttgcgacacatgcccggcagttcgtcgatgacgatctggatcccgcgcatgctcttgacctcggtatgcccgggcgcgatatgcacacggatgcccagttgctcgtacatccgctgttgcaggtgttcgaggtcttgcaggctcttgaggttttccaggcgcgccagcaggattttttcctgctggcgcgtcagttggagaatgcgcaggtcagcgccgggcgcttgcagcagttgttcacggttgcagacacaggcgccaggtgggcagggttggcgaagggtcattgacgctcccggcagagttgtaggagcgggcttgctcgcgaaaaacgtcaacgataacgcgtttttcctgaatannnnnnnnnnaaaaacgtcaacgataacgcgtgtttcctgaagaaacgcggaacctgtgcgtttttcgcgagcaagctcgctcctacaggtttgtgtgtcagtcgtttaggtgaacgcccaggctggccagggctttccagtagtcagggtaggtcttggccacgcagtccgggtcttgaatgcgaatgcccgagactttaagcccggcgagggcaaagcacatggcgatgcgatggtcggcgtgggtgtcgatcagtgcggtgcaggcggtgccagccaaagcggggtcgctcgctaccagcagatcatcgccctcgatggtcgccaggcccgggcgaatttcgttgaggccatcgtacagcgcctgcacgcggtcacattccttgacgcgcaggttcgccagttcggtaaaacgcaccggcgtgttgttgaacgcggcgagcaccgccagggtcgggatcgcatcctgcatttgcgagcctaccaccgtggcctgcatgttcgggaactgcgcgatcacagcctgggccttggcgtcgggctgggtgaagtcctgcgcggctacaccgatgtcgatacggccaccggtcagtacttctgcggcccacaggtaagtggcggcggaagcgtcgggttcgatcaggtagtcatgggcggtataaccggtgggggccacgcgccaggtggtgtcgtccacgacgtccacctgggcaccgaacgcacgcatgcaatcgagggtcaggtccacgtagccacgggcgccgatgtccttgccggtcagtgccacttcaatcggcgcttcgccgcacgcggccagcatcagcagggccgatacgtactggctggacaagccaccgtcaatctcaaagcgcttggccttgaccttgcccacaccgtgtaccgtcaccggtgggcagccagtggggctgtcgacctggatgccgttctggcccagggcagccagtagcgggccgatcgggcgtttttgcatgtactcgtcaccgtccagcaccacggtgccttgcacggtggcgacggcagccgtgagaaagcgcatggcggtgccggcgttgccgaggaacaacggttgtgccggcaattgcagcgagccttggctggtgacgacaaaggtggtctcgtccggctcgtcgatggtgacgcccatctgccgcagggctaccgacatatggcgcgtgtcatcgcttttgagcgcaccgctcaaccggctggtgcccttggccagtgccgccagcaacagcgcacggttggtaatggatttggagccggggggcgcgaccttgccagtgagggggaagttgggcggtgtaacggtcacggttttctgcgaactcaaggtacaaggctcctggtcaaggcgaggtggcgtggagtggccgacgtgcggacccgaatcatcaggcaaacacgccatgcttgtcgagtgaacgggtgatctgcgtgatttattggaatgcgctgcggcccaaataatgtaggagcgagcttgctcgcgaaaaacgtcaacgataaagcgtgcttcctgaatgagcgcggcgcctggaagtttttcgcgagcaagctcgctcctacaaaaaaaggtttgcctgccttaacgctggctcagccagtagtcatgcagcgcccgcgcagccggttcgatttcgctgacctgcagttgatgggcatttacatccagatccgccggtagttcgaaattgtcctgttcggcgcaccaggaaatccgcgccagttgcccggcgtgtgccgcgggcaatggtggccagttggcgatcgcgacgccgcgcacataaccaaaacaccattcctcggcaagggtcaccgcctggtcttgatgttctgtttcatcgaaacgggctttgaatgcctgggagtcagtggccaattgcgcggccagggtattcatatggcgtacgcacagttcgagaaaagcctgggcctcgtccatgttgtcccattcagggttttgcccgccccagatcgccgggaaccactcggccacatccaccttggccgggctggaaaccagggcggtgaagtaaccgtcgagttcggccatgttcagcaccgagtggtcttcgccgtatttgagcaaggtggcgtcaatgaattcgaaatcggcgggagcgaggggttgggcgtgcatggcatatccttaaaacgtcgagcgccgcggttggggcggcttaaagcgcgaaggatggcgtgtgtgcggggttttatccagcgtcttttcctgcgccggtgccagtcccgcttttggccgatgcgccgtggcgcacccttgatatagtctggcctttctcaatcgccagtcagggatcactgccatgtccgaataccaagccttcgttgtcgaactcagcggcaacgttgcccatgtgcagatcaatcgcccggaaaagatcaacgccatgaacgcggcgttctggaccgaaatcatcgacatcttccaatggatcgacgaaaccgacgccgtgcgtgccgtggtgctcagcggggcgggcaagcacttttcctcgggcatcgacctgatgatgctggcctcgatcgccaatgattttggcaaggacgtggggcgcaatgcgcgtctgctacgccgcaagattctcgagctgcaagcctcgttcaacgctgtggacacttgccgcaagcccgtgctggcggcgatccagggctattgcatcggcggcgccatcgacctgatcagtgcctgcgacatgcgctatgccgccgaggacgcgcaattctcaatcaaggagatcgacatcggcatggccgccgacgtcggcaccttgcaacgcctgccccgcattatcggcgacggcatgctgcgtgaactggcctacaccggccgtcagttcggcgctgaagaagcccgtagcatcggcctggtcaaccgcgtgtttgctgatcagcaaagcctgctggcgggtgtcatggacctcgcccagcaaatcgccgcgaagtcgccgattgccgtgaccggcaccaaggccatgatcagctacatgcgtgaccacacagtcaatgacggcctggaatacgttgccacctggaactcggctatgttgcaatccaacgacctgcgcgtggccatcgcggcccacatgagtaagcagaaacccgaattcgtggattgaccgacatgaccccaggctggattactacaacgctgctggacaacgacgcccctggcggctgggccgtcgcccgcagccgcgaaggctttttacacgacaccaatggcccgctgttcccgcgcgaatggctcaaacgccaggacctgtcggtgtttgccgaacacggcatcggccacctcgacggcgagccggtgtacctgctggaactcgactcggtggcggatgtgccagggtgcagttggcagggcttgcgcggctttatgctgcaaggcgatcacaccctgtacaaagtgctgggctacgccgcgcagatcggcacctgggcgcgggagcaccgcttttgtggcagttgtggccaggcgatggtgcaggtgcctagggagcgggcgatgtattgccaggcctgcgacctgcgcagctacccgcgtatctcgccaagcatgatcgtgctggtgacccgtggcgatgagatcctgctggcgcgttctccgcgtttcgtcacgggggtctatagcaccctggccggttttgccgaaccgggtgaatccgccgaagactgcctgatccgggaagtgcgtgaagaggtgcaggtggaggtcaagaacatccagtacatgggcagccaatgctggccgttccctcactcgatgatgctgggctttcatgccgaatacgccggtggcgatatcgtgccccaggccgacgagatcgaagatgcgcagtggttcaatatccacgagctgccgccgttgccggcgtcacgctcgattgcgcgttacctcatcgacctctacgtggcccgccgcttaggccacgctgaaccagtgctgccaggctaggcgtacggtcaggcccagcaccacggtgataaacaccgggcgaatgaatttggcgccgccgctgatcgcgctgcgtgcgccaaagaacgcgccacacatcaccgacacccccatcgccaggccgacaatccagtccaccgacccattgatgatgaacaccgtcagcgccgccgcgttgctgacgaagttcatgctgcgcgccacgccgctggccttcaccaggtcgatagggtgcagcagcatcgtgctgaccgtccagaacgcccccgtgccgggcccggccacgccgtcgtagaagcccaggccaaagccctgggtggcttgccatttcttcttgatcggtgcctcggcatccagcggcgccttgggcgtgccaccgaacagcaggtacacaccgcaggcgaagacgatcaccgggagcatcttgttcagggtttcggcgggcaagtaatgggcgacgaccgcgccggtcagcgcaccgatcagtgtaccgacgatggcgtgcacccattggcgtgggtggaacagcttgcggcggtagaaggtaaagctggcggtggccgaaccgaaggtggagctgagtttgttggtgcccagtaccagatgcggcggcatgccagcggtgagcagggcgggcgtggtcaacaaaccgccaccgccggcgatggcgtcgataaaaccggcgataaaagcgacaacggccaggatggccagggtagtgaggtcaacgctgagttcgaaaggcatgggcagggcttattgttggagggccgcagaaagccagcatcttactgcgatgtggcgggtctaggcgattcaaatgtgggagcgggcttgcccgcgaaggcggcctgtcagtcactgaattttcaactgaaccaccgctatcgcaggcaagccagctcccacattggttatgtattgcccacaaaatctgcgcctggcacagaacctctgtgggagcgggtagacacccagcctcaccgaaccgagttctgcatcacaatctgtggcagatgctcggacagaaagtcaatcagcgccctgaccgaaggcagcatgccgcgccgcgccgaatacgccaggtgcagcgtcagctcgggggcactccattctggcagcaccaccaccaattgctgtcgagctagggcgggcaggcacgcaacatccggcatcatcgcgatgcccaacccctggatggccgcattcaggatcgtttcatgctccctgcacatcaaggtcggccgcagcttggcggtggtgcgcgcaccatcggggcccaccagcagccattgtggctgcggctcatccgccgcttcgtagtagagcgttggccgttgtgccagctcgtccggatgagacagcgaccccgtgcgatggaggtagtccgggctggcgaccaggatgcgccggctgatccccaggggtttggcgaccaggtcggggtccatgtcctccggccggcgcagccgcacggcgatgtccaccgattctgcctgcaggtccaccgtgcgatcggtggcaagcacctgtacgcgcacttgggggtaaagggtcatgaacgccggcaggttaggggccaggaatacctgcgtcgccagcaccgggcaactgatgcgcaccagcccacgcggcgcggcgctggccatgtcgatgacctcttgggctgcgagcgcttcggtgatcgaggcgcggcagtggatgaaaaaccgctcaccgaggtcggtcagggacacgtggcgcgtggttcgatggaacaagcgggcgcccaggcgttgttcgagcgccgcgacgcgtgcgctgagccgcgacttggggatgcccagcacccgtcccgccgccgaaaacccgccgtgctcggcgaccatggagaaatagtagagatcgttgaggtcctccagcacagcctgggtggtcatacgattgtccggttttaagtaacagaaggttcaaaactagcatctattgggatgattgtcctttggttaggctgatgactcaccgaatcagctggtactcaaggagcccccgacatgcctctgcttaccgccgccaatcttgcgcaatatggcgaccctcatccacgccagcgagttgccgtgctcgacaccgacatgagctacgtggacgtcggcgcaggcgaccccatcgtcttcctgcatggcaaccccacgtggtcctatctgtggcgcaatatcattcctcacgtgctgccacacggcagatgcctggcgccggacctggtgggtatggggctctcgggcaagtcgccgactcgcgcctattgcttcgaggatcatgcccgctatctcgatgcctggttcgaggccatggggttgaccaacgttgtgttggtcaccgatgactggggcactgcactgggagcgcattgggccaaccgcaaccgggatcgtgtacaggcgctggtgtatatggaaggtgtggtgtttccgggaagctgggacgattacgccggcgcaggcaaggacctcttcaaagccctgcgctcggaaccaggcgagcagatgatccttgaggagaacctcttcatcgaagggatcctgcctcgcaccacattgcgcaccctgggcgtcgaggaaatggacgcctaccgcgcgccttttgccacccgggaagaccgatggccgaccctggcctggccccgcgaactgcctatcgagggtgaaccggccaatgtcgtcaagatcatcgaggcgtctggcgcatggttggcgaccgaggcactgcccaagctgctgatcgtcggggagccaggcgcggtgctcaccgggcgtgcgctggcctatgcccgcacatgggccaatcaacgcgaggtcagcgtgccgggcattcatagcctgcaggaagactctccggccgagatcggcctggcgctgtcgctcttcctgcgagaactgcgccccatcacctgaagccatcccattcacacccgtgcatgacctgacccctggaggtagaccatgaaacacacctacaaaggccccgacgatgcgttggaagtggcgcgctttgtctgcaatgcagtcaacggctggaccgaaaacccgacacggatgattccctatttcaccccggacggcggttgggaatttccgttcgcgcccatagagtttggcctgttcttcaaggaggtccgtggagccgaggccatgaagcgctacttcagctcgctcgtgccttatatggaaaatctggatatcggaccggtagaaaattggatcatccacacgctgaagaccccgcatacctacgtttacgaatacaccggcacggccaccatcaagggctcgggcaagctctatgagcagaactacatttcgatcgtgacgctggacggcggcaagatcaaaacctatcgcgagcattgggacccctacgtcgcgctgcgcgatttcggcctggcgcgcgctgttgacggcgacgcgaagtagcgactgcgacagttcccaattgcaaagacgaggtgaaacatgaacgcaaaagacgtggtaaccacgatgtggaccgaactgatgaccgccaaggacccggccgttatccagaagtgggtcgccccgacctacgagcagcacagcccctatgtgcaaaccggccgagaaggtcttgagcagttagtggcaagcctgcgagacgactacagctacgagctggtgcggatcttcagcgacggcgacctggtggtgttgcacggtattcatcgcaactggctcaacggcgtattcaccggcggcgaagctgttgtcggcgtcgacatgttccgcgtcgcggatgatcagatccaggaacattgggatgcgtcggtgcccgtgatgcgcatttctgcctccggccgcacccagcttgacggcccggcgacggttgaacatgcaggcatgacgcagcagagcgcaaacacggctaaagccttcgtccagacggtactggtcgacaagcagcatcagcgcctgcccgagttcatcagcaagcatgggttggcacagcacattacggaaattgccgatggcgccgcttgcctgacgcaagcgttggcggtgagcgacaaggagtatgtcgcgatcaggaagatggtggctgaaggtgagtttgtcgcggtccagtcagaagggcgggtcaatggtcaaacccacaccttctgggacctgttcagagtcgatgcgcatgcaaagatcgctgaacagtggcaggtagcggcggtgttccccgatgtcgtaccccacgacaacggggcgttctagagcgttatttgtgcgcgcccagccattccacggccgtgcgccagatgcagatacccaggaaataggccgacatcagcgaccacaggccaaatgtccatgggttggtgttggggtagtccaccaccatcaggaagctgcacaacagccagatcgtggtcaccgcgatgttgatcggcatgaagcgcttgacccggaacgggtgcaggaacttcatcggcgtcacggtcaacagcgccaggccgatcacggtcagcaaggtgacccaggcatccggctggatgatatagacgcacagggcaacgacgttccaggcggcagggaagccgacgaagtagttgtccttgctcttcatgttcacgttgcaaaagcagaacagcgacgacaccaggatcaccgacaccgcaaacaggtgggtgaaatcgggcaggtcgatgtagcggtagataaacagtgccggaatgaatacgtaggtgaggtagtcgatcaccaggtccagcaccgagccgtcaaagctgggcagcaccgtgctgacattcacccgtcgcgccagcgagccgtcgacgccatccaccaccagcgccaggcccagccacagcaggcacgccttgggggagttttccagcagcgccagggtggccaaaaaggccagtaccacaccggtggcggtaaagccgtgggcgccccaggctttgagtctggctacatgcagggtcgatatcacgggcggttctccaaaaggtcaaacggggcagccgacgacgtagcgtcatcgagtctggccagggaatgcaggtatcgaccgggaaggggaggataaggttcaccgcccggcgtatccgttagcgtagcaagcgtaggatgtttcggcatcagccctgacggaacaccagtgcctttagcccactctgtgggtcaatgtcagggaattccggtgggttttccagccgctgcacaaagcgcaggcccggtgcttcgcgggtcacgccgtcgatcaggaaatcttcgccgaaggcaggatcgttcatgcatgccagtacggtgccgtgggcactgagcaagtccggcaggcggcgcagcacgcgctggtaatccttggtcagcaggaaactgcctttctggaaggagggcgggtcgatgatcaccaggtcgtaagggccgttgttcgtcaccttggcccaggacttgaacaggtcgtggcccaggaagctcacccggctcaggtcatgcccattcaggcgatggttgtcgcggccacggctgagggcaccacgggccatatccaggttcaccacatggtcggcgccgccttcgatggcggccacggaaaaaccgcaggtataggcaaacaaattcagcacgcgctggccctgggcctgttcgcgcacccagttgcgcccgtaacgcatgtcgaggaacagcccgctgttctgttttttacccaggtcgatcaggtagcgcaggccgtcctcggtgatggtcagctcgtcgatggcgtcgcccaccagccattcggtggtgctttgcggcaggtagcggtgttgcagggccacggtgtgtgcgccgaaagcggcccagtcgatgtgcagtagcgtctgcttcagggcctgcaggtgctcggtttccttgaacaacgccaccagcaccaccccttgcagccagtccaccgtcagttgttccaggcccggccagcagcggccacggccatggaacaggcgccgggtttccgcaggcgcgtcagccagggcagtgagcaagtgggcgtgcagggtagcgagtgcgtctgggttcatcgttaagggtcagtcatcgggcgggcggcattttaaacacaactgtgggtcaacgcgtggcaatcagcgccgggccgaatgactctttcaagaaaaccggggcgatatagcgttcgtaatgtgcctcggacagcagaaaaaactctcgatctatcgcatcgcgcaaatccgccaggtggcgctcgcgaaactctggcagcaacgccaacccataggcatcgagcctggaaatcacccgcgcaccccgtgcgatcagctggtatgcccagcaatacggcgactggtgcggcataaaacgaatcttgcgcgcttccagctgctgtcgcaggcagtgcgggtcgaacacttccagcttgctggccatcacctgcaccagcagttgttccagacgcagccacaccgcctgtttttcctcggcgctatagccattccactggatcacctcgtggtgatagcgcttgcagccccgacagaccaggtcaccgtagacggtggagcacaggccgacgcaaggggtcttgatggagtgcggcattttcaagcctttgaagaaagtgtaagcgtgtttagtcggtgtttctttgtcgccaagtgggcaacgatggcttcaatccattgcgagcgacacccatgaaaacaccgatcaaagcctggctgtacgccgtgatgttcaccgctgttgccggctgttccaacccacctactcaaagagacatcgccatgcccaaacccctggtatccctcgccgtactcaaggccaaacctggccaagagcacgctctaaaagctggcttgctgagcctgatcgaaccgacgctggccgaacctggcaatctggattacgtgttgttcgagcgacgcgacgaacccggcacgttctacatgcgcgaggcattcaagaaccaggcggcactggatgagcattttgccacgccttacttccagcgctttgccgccacggcggatgcgttgctcagcgagccgttgcagttgattttcctggagcaggtgtcgaactgaagccgttgacggtaggagcgagcttgctcgcgaagatcccaagggcgccgcgttcattcaggatgagcgcgttatcgttgacgttcttcgcgagcaagctcgctcctacagcgttacgtcagtcccagctcaacgcaccgccggtctggtactcgatcacacgggtctcgaagaagtttttctctttcttcaagtccatgatctcgctcatccacgggaacgggttggtggtgcccgggtactcttccttcaacccaatctgcgtcaaacgacggttggcaatgaacttcaaatagtcttccatcatcgccgcattcatgcccaacaccccacgcggcatggtgtcgcgagcgtattcgatctccaactgcgtaccctgcagaatcatctgggtcgcttcttccttcatctcggcatcccacnnnnnnnnnnnnnnnnnnnnnnnnnnnnnnnnnnnnnnnncaccgtcgaggcggtccatgttggcttcggtggcgtggccggcgttggcgcctttgatcaccgctgcaccggtgtcttcgttgtcgacttcatcccaactcagcatggaaatactccttcctggtactcgaaaaataaatgtttttgcaggctacaaggcattgaaatactgcgcgtagtgtggtcggtaaataccgatgctgcacactatgtagtggtctgatctgtttgtgggcacactatatggggtgtgacaacgttggtcaacgcacaagatgtgcggtcataggtcgctggcacacacaaattcagccgtggacgggtcatgaaacatcactctgcttatgtctttatcgaataaataaatagatatttattccttttaatattctatccggcagcgcattttgagggcctgcgcattcgtgcggattgacccaacagccaaaaggaaagccgacatgaccatcaaagcgatcaacgtgcgcaaccagttcaaaggcgtgatcaaggagatcctgctgggggaagtggtgtcggaaatcgacgtgcagaccgcctcgggcattgtgacgtcggtgatcaccacacgctcggtgcgtgacctggaattgaaggtgggcagtgaagtgattgcctttgtgaagtccaccgaagtgtccattgccaagttgtgagcgcccaacagggtcagggaaaggcgtggggcagcgccctcagtcaactcgattgaaaatttccctgacctgatcctcgggcatcacccctttgcccgttccctcgatcagctcgaacgtgccatcggcattcagcgtaatgcccagggagctggccagcgtgacgctgacgccgggccgtgcttgaagcagtgtcctgagcggttgttcgccctgcaacgattgcccgatggtggtggccatgccttgcagcgaacctgaattgaccccgcctaccaggatgacctgcccacctttgttcagggatgcgttcaatcggttcagcaacgcttgggtattgccgccccgcaggcccagctccaggttgctgccggtcaggtgcatcagcgtgcgggtctggtaacgcgcaccgtcccagtcggtgagcaccgcaatggccgagcagtcggtcaggctgcgggtagaaagcacgtcgttgccgctcgtgagtgtcgtggcttcacccatggtcacctgcacggtattggcggctttcagcttggcggtgcgccgcaaccagcccagggtaagcctggccgcgtcggccctggccaggtctgcggccggatgcacctggttgccaggcaacggtgaaacacgatgggggcgcaaggccacatccggtttcacgatggcattggcctgttgcagccggtacaccacttcgcgctgctgctcagggttcatgcctttgcagtggcgcttcaattcgtcgatgtcggctttgctaaaacctgagcgctgcagctgcttgaaggcttttttgagcggagccagcgcaacaaagtcggcctgaagggcctgcacagcatggttggcactcagaaactggcggtacccttgcgcaaggctcagctctagaggcccgcatttcttgaacctgatatcccgggtttgcgttttatccaatggtgcgtaatagaactcggcagtgtcagcctctaccaccaggtagcgctggctgccgctggtgacgaccacgcctctgagctggcgttgatcattgctggcattgctgatgctgccgagcttgaccacccgggtatctttagcaagcgtgtcggcgctgtcgcctgtgtaaaagccgaaatcggggtcgtcaatgagctggccgcgcacgtgcgccttgtaagtgatgcgttcaccgtttgcgacgggcaccagttgggggccggtgtcgcctttgactattttgtgcaggcgtttttcatagaccaccgtgcgctcgcgcgtgaacagcccggccttggacgggaacaaccgcacgtgctccagggcctgcaggcgttgttcgggtttgggcaggtcggcgacacgtttaacgaagcactcatcctgaatgccgcgtcgcacccgcccacccagagcgggcacagggcaaaacgcctcaaagtcctccaagggcttggcgtgttctgttgcttgcaggtcggtcagctcgccaggtcttgtattgaggtagcgatagacccgaccacggtccaccaagtcatagccattggcgcgtggcagggtataggcactggggctcaaagggtgttcgatgaccattgcctgccggccgtcgctgaaaagctcccgagtcagagggatcgtggccggttgctcaaaggcaggctccttcacggtaccgcccacgatggcgaacagctcattgagcgcgccatccagtgcggcactgctgccgtgtttgcgctcggcctgcgtgtcacccgtgatcgattgctcgacacccaattgggcttctacaaggccggcggcggccgcgacaccgaccacaaccggctcgccaatcactgcgaacttggccgccaggccggcggctacggtcaaatcgttaagccaggtatcgcgggtgacctcgctgttggacttaatcatgacgtctgcatcgcgggacatgcgttcgcgggtggcgtctttgatcacgctgaacacgtcgccgtgaatgcgcacattggcgctgtcgataacggtcccttccagggtgtcccagtagccgctggccaagtagcgaatggcgctgtccgcgcctttgttcgagcgcgaatcgccggtgatgaaggatttgaaattgctccagaaccccaagtcgctgtcttgtcggtccctgagggcgaagtgcgattgcagcgccttgcgcgtctcggcatgccggccttgctcggccacccattggtccatcgtgtccagggaatcaaagcgcaggaaagcgggcttgtgccccggcatatacaggacctgcacgccgtctcgacgatcacgtaattgcccgtggctgccgtagtcagtggcggtgaaacgcaggatgtcgtgagcggggcgcccgttgatgtcaaacacgtgaacccgtgtgcggccttctaccggcgctgtcgctcgtagttgttcgacgctcagggcttggttttcatccaggaacaggttggcggccgcgcccatcaccaggcggtagtcatcgcgggtaaagcgctgctcggccggcatgttcaggcgttcggtgggtgaggcgcgctcgtaggccttgagctgttcacgggcctgataaatgaactcgcctttcaacgcggtgcggtagtcatcgccatggtcgcgccagaagcgttcgagcttttgagtcatgtgcgcctgaaagtcggttttccagctttcatgcatcagctgggaaggcgccagcgcaaactggttatgggcgccatagccgccttgggtactttgcccgcggccgaccgtgtataagccggcttgctggtcaagcacgccgggtagcgcatcgtgttcgctgaagttgctcaacagtgcgtccggcagcgcctgggaaaccgtgggctcttcccccagatgttcccagtcggtgacggtattggcactttgtgcttgctgaaagcgattgaggaagatggcgtcggcatcgaccttgcgcccggtcaacttgaacaccagcgcctcggcccattgcttggcttcgtcgcgcaccctgggcagcgcagtgtgcgtggcctgcaacagctgccggtagagggctttctgatggtctaccgatgtacttaggttttgcctcaacgccggtttgcgtggcggttgcagaggctccaatgagtaggccggcaaggcctgcggggtatcgccggcgatgggtttgaaatcccaggcaatgagggggagtgggcgtggcggcagaatcatcgacgggcggctccgggagaatttcaatggcacagcgggcagctaagcccggtatgtgcgaaaaatctcccgtgcggttccgaccgacgtcagcggttttgtaagctgatctgcatgcgctgcacgccttcctccagcatcgcccgtgggcaaccaaagttcaggcgcacgaattgctggctgtcatcgccaaattcaatccccgcgctcaggcccaccttggcctgttccaggaagaaccgttgcgggtcttccaggcccaatgcgctgcaatcgagccacgccagaaacgtgccttgcggcgcatgcatcactacgccgggcagtcgggtttttaccgcgtcgagcaggtagtcacggttggcttgcaggtactgcaccagcgcgttgagccagtcggtgcattcgctgtaggcggcgcgggtggcttccaggcccagggggctgacgctgtcgaccatgccgcagcgcgcctgattgaaacgctcgcgcacctcggcgttctggaccacggcgaagcaggtcttcaggccggccacgttatacgccttgctcgctgacatcagggtgatggtgttctgggcgatctcggggctgaggctggcggtggggatgtggcgacggccgtcgaagcacagctctgcgtggatttcgtcgctgatgatcaatgcgccggtgtccaggcaggcattggctaccgccagcaactcttcacgggcaaacaccttgccgatggggttgtgcgggttgctcagcaacagcgccccggccccgctcaaggcttggcgcatggccggcagcggtgtgcggtactcgccatcgatcaattggaacggcacttcgatgcgtggcaggttccagttgccgggcgccaggcgaatcggccgatagttgggggtttgcagtaccaccgcctggccaggctggacgaaggcgtgcagggccatattgaagccaggctccacgccgggcagaaacagcagttcttcaggctgtacgcgccaggcgtacttggcccacaagtcggcaacgatagcgtcgcgcacgtccgggccggccacgctgtagccgagaatctgctggtcgaggcgcgcgtgcagggcttgcaagatggcgggcggcgcggcaatgtccatgtcggcgatccacatcggcaggacgtcttgcgggtaacggctccacttggtactgccggtatcgaagcgtgggtggatcgtgtcgaaatcaaagctcatggacaggctcgtatcagggcggcggtaaaagaatggcgccgattctagcgccattaattttataggccagagctgattgccgacgtgcgcagcggtgtgcgttccatgaccgacaagttctgtaataaaaacgccattgcgctggggattgaatcggctaggggctattttggtgcatctcaataatcagagtagccatggatgaaataccaacccttgagtcacacgttgattgcgaccgcgctggtcttgacggtcaacggtgtgcacgcagcttcccaagccccggttgcgggtgaaaatggcatggtggtcacggcccagcacctggcaacccacgtgggtgtcgatgtgctcaaggccggcggcaacgcggtcgacgcggcggtggcggtaggttacgcgctggcggtggtgtacccggcggcgggcaacctgggcggcggtggtttcatgaccgtgcaactggcggacgggcgcaagaccttcctcgacttccgcgaaaaagccccgttggcggcaacggccgacatgtacctcgacaaggccggcaatgtggtcgaaggcctcagcgccaaaggccatttggcggtcggcgtaccgggcacggtgtctggcatggagctggccctgagcaagtacggcaccctcaagcgcgcgcaagtgattgccccggcgatcaagctggccgaaaacggctttgcgctggagcagggcgatatcgacctgttgcacactgccaccggtgagttcgaaaaagaccaggacatgcgcgggatcttcctgcacaacggaaaaccgatgcaggtgggtcagaagctggtgcagaaggacctggccaagaccctcaaggaaatctcggccaagggcaccgacggtttctataaaggctgggttgccaacgcggtggtggattccagccaggccggcaaaggcatcatcacccaggccgacctcgacgcctacaaaacccgcgaactggcccccatcgagtgcgactaccgtggctaccatgtggtctcggcaccgccacccagctcgggcggtgtagtgatctgccagatcatgaacatcctcgaaggctacccgatggccgatctgggctatcactcggcccagggcctgcactaccagatcgaagcgatgcgccatgcctacgtggaccgcaacagctacctgggtgatccggacttcgtgaagaaccccatcgagcatctgctggacaagaactacgcggccaagctacgcgctgccatcgagccgcagaaggccggtgactcccaggcgatcaagccaggtgtgtcgccccacgaaggcaataacaccacccactattccatcgtcgacaagtggggcaacgcggtctcggtgacctataccctcaatgactggtttggcgccggggtgatggccagcaagaccggggtgattctcaacgatgaaatggatgacttcaccgtcaaggtcggcgtgccgaatatgtatgggctggtgcagggcgaagccaacgccatcgcaccgggcaaggcgccgttgtcatcgatgagcccgaccatcgtcaccaaggacggcaaggcagtaatggtcgttggcacaccggggggcagccgcattatcaccgcgaccttgctgaccatcctgaatgtcatcgactacaagatgaacatccaggaagccgtggacgcaccgcgcttccaccagcaatggatgccggaaaccaccaaccttgagacctttgcggtcagcccggacacccagaagatcctcgaaagctggggccacaagtttgccggcccgcaagatgccaaccacctggccgccatcctggtaggcgcgccttccctggacggcaagccggtgggtaacaaccgtttctatggggccaatgacccgcggcgcaacacgggcttgtcgttgggctactaaaaggagctggcattgtctctgtaggagcgagcttgctcgcgaaaaactcacaggcgccgcgtttatccagaaaacacgcgttatcgttgacgtttttnnnnnnnnnnnnnnnnnnnnnnnnnnnnnnnnnnnnnnnntgggtgacgttctggttgatgtcttccaccacgtgggcctgttgcagggtggcgctggcaatcgaggcgttcaggccgttgaggttgtgcagcgcctggccgatggcggtgaggctcgcgcccgcctggccggcttgttcgatggttagttgcgaggcgctgtggctgtcgctgatcaccttgaccgccgcttccgagtggccttgcaggcgctcgatcatcacctggatctcggcggtggatttctgcgtgcgctgggccagcaggcgcacctcatcggcgaccaccgcaaacccacggccttgctcaccggcgcgggcggcttcgatggcggcgttgagggcgagcaggttggtctggtcggcgatggagcggatcacctccagtaccccgccgatctgcgtgctttcgctggagagcgtgcggatcacctcaacagcctgactaatagtggtggagagctggtcgatctgctgcaagctgccgtcgatattgacctgtccctgttgggcctgggcctgggcatcgcgcatttcgctggcagcgtgctcggcattttttgccacgtcctgcacaccgtaggtgacttcgttgatggcggtggccaccagttccatctgttgcgattgctgctggctgcggtcatgggcctggctggcgttgtggcccagttcggtggacgactggcccagggcgttcgcgcacacctgcaactggccaaccacctggcgcagtttagcggtgaagctattgaagtgctgggccagttgcgtcaattcgtcacggccgtgggtgtcgaggctgtgggtcaggtcgctttcgccgctggcgatattgcccatggcattcaccgccgcctgcaacggctgcacgatgctgcgggcaatcagcaccaccagcacggccatcatcagcgcaatacccaggccaatggccgaggctttccacacctggcccctgaattcggcctgcacatcgtccacgtagacgccggagccgatgatccagccccagggttcgaacagttggatgtacgaggttttctctaccggcgcttcggcgccaggcttcggccagcggtagttgacgatgccggcacccttggccttggccaggctcacgaattcgttgaacacggcgaaaccgtccgggtcgcgaatcgccgagaggttctggccgtcgagcttggggttggccgcgtgcatgatcatcacgggggtgaggtcgttgatccagaagtagtcgtcgtggtcataacgcaggccgcgcaccgcgctcaaggcctgttgttgcgcggcgtcgcgggtcagtacgccggttttttccaggttctggtaatagctgagtacgccactggcggtctgtaccacgtgctgggtctgctggcgcttggcctggtagaggtcgccgtggatctggttgagcatcaacagccccaaggccagcagcatcaacacggcgactatcaggatcagccaaaggcggcggctgatcgacatgctgcgcaaactgttcatcgtcctgtcactccctgctctttataattgtggtgctgcttcgagatttccggcgtgtctgataggctttcggcccggaatcgaaaaacctgagtactgcctgatttttcacggaatttttgcagaccggcgttgagaatcaaccgcgggcgcttgtgtgcgctcgtcgtcagtgaacttaaaaaagactaagaggcatgccccgcgcatgacctttggagacagcatggatttttggaccgccatacaggcattgcttctcggcatcgtagaggggcttacggagttcttgccgatctccagcaccggccaccagatcatcgtcgccgacctgatcaactttggtggcgagcgtttcgaagccttcaacatcattatccagctgggcgcgatcctggcggtggtctgggagtttcgacgcaagatctttgacgtggttatcggcctgccgacccagcccaaagcccggcgctttaccgtcaacctgatcatcgccgtattgcccgcggtggtactcggggtgatcttcgccgacctgatcaagcactacctgtttaaccctatcaccgtggccacagcgctggtggtgggcggcgtgatcatgttgtgggctgaacgccgccagcatgcggtgcgggctgagagcgtcgatgacatcacttggaaagacgccctgaaagtcggcctggcccagtgcctggccatgatccccggcacctcgcgttccggtgcgacgatcatcggcggcctgttgttcggcctgtcacgcaagacggccaccgagttctcgttcttcctggcgatgccgaccatggtcggtgcggcggtgtactcgggctataagtaccgggacctgttccagcccgcggacttgccggtgttcgccattggctttgtcacctcgttcatcttcgcgatgattgcggtcaaggccctgctcaagttcatcgccagccacagctacgcggcgtttgcctggtatcggattgccttcggcctggtgatcctggcgacctggcagttcggctggatcgactggactgcggtcaagccatgagcatccagcatccacgcctgaaggcgctgctctttgtgctgctgtgtgccgcgccgctgctgggctcggccttgctgtggtatcgcggcgaaacggtcatcccgttgatggcctacggtgtggtcagcgtggtggcgttcttcctgtactggagcgataagcgcaaggcccagaccgaaggctggcgcaccccggaaaacatcctgcacgcggtggagctggcgggcggttggccgggggcgttgatcgcccagcaggtgttccggcacaagacgcgcaaggtgtcttaccaggtgctgttctgggtgattgtgctgttgcaccaggtgttctggctggaccagttgttcctcggcggcaccttgctgtcaatcctctagccacaagccaatctgcgtgcgcttgggcagcttgctgaccaccaactggtgggagcgctgcaacaagccgcgcagttcctcagcgcccaaagggtagggcgtgttcatgatgacccactgtgccctcgccaggtaaggcgccgggtgaatgcccggccggtcgacgtggcccaggaacagctccttgtcgaccttgaaggccagcgactcaccgcgcaggttctgcaaggcgaacatcttgttgccggcaatcgaaaacacccgcacgccgccccacttatagtcttcccgtgcgcctggcaggctcaggcagaaacgcgcgacttgttcttctgtcatgctcataacagccgatctccacagcctttgaagccttcttccagatagtcgatccaggcccggatggccggcagcacgccgcgccggtgcgggtacaccgcctgcagccagccgcccggcaatgaccattgcggcagcagttgcaccagccggccgctggccagttcttcttcgcagtacatcatcggcagtatcgtaaagcccacgcccatgatggcgctggccttgcgcacgataaagtcctcgatgcccaggcgcgcttccatcaccagctcatgggtattgccctggggatcgatgatgcgttgatgcaccattcggtcggcctcaagtgcgccgagtatgggcaactgtttgaggtcttccagggtttcgacctgccgatcacgcatgaacgcggggctggccaccagcacggtgtgcgcctggcgcaggcgcttggtgaccagcaacgggtcttcatcgccttgttcgcgaacgcgcagtgccacatcaatgccttcggccaccaggtcgacgcggcggttcaccagggtcatgtccaactgcaccagcgggtgagcggccagaaaacctgccaccaactccggcaggatgtgttgggccagccccaccgggcaactgacccgcagccgcccacgcggctcgctggacatactggccacggcctcgtcagccatttccgcttccagcagcatggcctggcagtggcgcaggtagcgctcacccacggcggtgagggtcagttgccgggtggtgcgttgcagcaggcgtgcgcccaggcggtcttccagctcggcaatgcgccgtgacaacctggattttggaatcccgagcagccggccagccgcagcaaaaccgccggcttcgacgactttagcgaaatagtagaggtcgttgaggtcttgcatggtgggcctattgtcctgtcagtgggacaaactatcgcatttcagatggcttatcgaccattggtttcatgcgtagcatcaccaccatctgatcgccactgtcgatcccacctcggagatccatcatgaaactgttgcacatcgattccagcatcctcggcgacaactcggcctcccgtcagctcagcgccggtgtggtcaaggcgtggcaggccgctcagccgggcgtggaagtgacttaccgcgacctcgccagcgaaggcatcaaccatttctccggcgctaccctgggcgccttgggcactgccgctgaactgcgcgatgcggcgcaaaagcacgaggctgaactgagtgcatcgtcgctggctgagtttctcgccgccgatgctgtggtggtgggtgcgccgatgtacaacttcaccatcccaacccaattgaaagcctggatcgaccgcatcgcggtggccggccagacgttccgctactccgaagccggccctgaaggcctgtgcggcaacaagaaggtcattattgtctccaccgctggcggcctgcatgccgaccaagcttcgggcgctgcccatgaaggctacttgaagctgctgttcggtttcctcggcatcaccgacatcgagatcgtccgcgccgaaggcctggcctacggtgatgaagtgcgcagcaaagccatgagcgacgccaacgtgcgcatcaacgagcaactgttcgccgctgcgtaaggcttatgtaaatttgccctgtcctcggtttcattctgaaaccgagcgcctaaactctgtattctgatcgcctgaacgcgagcggagtacggagttttttcgttgtggcccgggttatgcaaacatccattcgataccctggactttttattcgacaggccggttcttgtgcagcaaaggtggacatccccatgatgcgtctttgtgctgttttggttctttcgctgttgggcggcctgctttcagtgcacgccgcgccggcaccgcgcccccattggagtgtggggtttcatcgcatgagttttctcgacccgctggatgcgcagccgatgaaagccatcgcgttctacccctccaccgatgccgagcgcaccaccgcgctgggcgcctaccatgtggcggccagcgaagatgccaaggtggcgatcgggcgattcccgatgctgatgttgtcccacggcaataccggcacgccgctggccctgcatgacctggccaccgccttggcgcgcaaggggtttgtggtggtggcggtgctgcatcccggtgacaactacaaggaccacagccgcctgggcaccgtgagcaatttgtacggtcggccgatccagatttcccaggcgatcaccgccgccttggccgagccgatgctgtcgccctttgtggatattgatcagatcggcgtcatcggctattcagccggtggcgagacggcattgatcctggccggcgccaagcctgatttcgaacgtctgcgccgctactgccaagagcgccccgaagaccgcgacgcgtgcaccaccaagggcgagctggtggtcgaccgcgacgatttgcaaccccaggccgatccgcgcatccatgccttgatgctgatggcgccgctgagcttgatgtttggccgccacaccctggcggacgtgcatgtgccggtgctgctctacagtggcgatggcgaccagttggtggccgtggacaagaacgccgccgccctggcgcgcaagttgccgcagcccccggatttcaaactgttggccggggccgggcacttcgtgttcatggccccgtgtgacagcgatcaactggcgagcatgcccgccatttgcacggatgccgatggggttgatcgagaaggcatccaccgcgatctggtctccgaggccgggcgttttttcagccataccctgggcgaggccacccgcgccggcttgcagaccgctgatcagtaggcgcgacgccggagcaatacggtcaggccgagcgcgctgaccgacagcaacgccgcgcagaagaagatccagccatagccgaggttcagcgccacggcgcccatcaacggcccggcaatcgccagtgccagatcgaaaaacaccgcataggcactcagccccgcgccgcggctgctgtctggcacttgcttgatggcttccacgccaagcgccgggtaaaccagtgacaagccaaagccggtcaaccctgcgccgatcaaggccacgccggtagacggcgccagccacaacagcgtcaggcccagggtttcgatgagcatgcaggcgatggcggcggtgaatccaccaaaccggctgatggccgaaataaacaccaggcgcgacaggataaaacacacgccaaataccgtcaggcaatatgccgcaccggtccagccacgattgaggtaatacagggtgatgaaggtcgtcaacgtgccgtagccaatcgaggccaggcacaggctggtgccaaacggcgcgatacgcccgaacaccgcccagaatggcagccgctcgccacgtaccactggcaccgacggtttattgcggatcagcaccaggcccaacgccgccaacaccgccagggcaatacccaggctggtgtagccgtagtcagccaccatcaccacgcctaacggcgcaccaatggcaatggcgccataggaggcgatgccattccaggaaatcgagcgtgcggtgtgctcggcgcccactgcgcccatgcaccaactgatggtccccacgccaatcaggccctgggccacgcccagtaacaggcgaccggcgatcagaatacccaggctcaagctcggcaggctgtccagcagcgtggcgataaaggtcagtacgccgctgatcagaatgccggccaggcccagcacgatcgcgcgcttggtaccgacgttatccgacatccgcccagccatcggacggctgagcagcgtggccaggtactgcgagccgattgtcaccccggccaccacggcgctgaagcccagttgctcatgcacatagcctggaatcaccgcaatcggcaggccgatgcagataaaggcaatgaaggtatagaagacgatggaaacgatctgcagggtgatcgacagggaggagggggcggcaggcatgaatactcaatcgctggcgggcggtaaagcatcatggcatatcccgcctccctgtaggagcgagggacgcctaccgtcgatccctgtgggagcgggcttgcccgcgaaggcggtgtgtcagccggtgagtctataactgaaccaccgctatcgcaggcaagccagctcccacactggttatgcatggcccacaaaatcagcgtctggcacagtttcctgtgggagcgggcttgcccgcgaaggcggtgtgtcagtcagtgaatctatagctgaaccactgctttcgcaggcaagccagctcccacattggttatgcatggcctacaaaatcagcgcccggcacagtgctgatgcaaaaaagccccgtcacaggggcagggcttttgcttgcagctaagtgctgctcttagaacaccacaccctggctgcgcaggtagtcgtcataggtgccgctgaagtcgatcacgccgctagggctcaactcgataatgcgggtggccagggacgatacgaactcacggtcgtggctgacgaagatcagcgtgcccgggtagttctccagcgccaggttcagcgcttcgatggattccatgtccaagtggttggtcggttcgtccatgatcagcacgttgggcttttgcaggatcagcttgccgaacagcatgcgaccttgttcaccaccggagatcactttgaccgacttctggatctcgtcgttggagaacaacatgcggcccagggtgccgcgaatcatttgctcgccttgggtccattggcccatccagtcgaacaggctcacgtcgtcttcgaagtcgtgggcgtggtcctgggcgtagtagcccagctcggcggcgtcggtccacttgatgctgccggcgtccggggtcagttcgttgaccagggtgcgcagcagggtggttttgccgataccgttcgggccgatgatcgccacgcgctcgcccgcttcaacctggaagctgaagtccttgaacagcggtttgccgtcgaaacccttggccatcttctcgaccatgaccgcctgacggtgcagctttttgttctgctcgaaacggatgaacgggctcacacggctcgatggcttgacctcggccagctggatcttgtcgatcgccttggcacgggaggtggcctgtttggctttggaggcgttggccgagaagcggctgacgaaggattgcagttcggagatctgcgctttcttcttggcgttgtccgacagcagttgctcgcgggactgggtcgccacggtcatgtactcgtcgtagttgcccgggaacaggcgcagctcgccgtaatccaggtcagccatgtgggtgcacacgctgttcaggaagtgacggtcgtgagagatgatgatcatcaggctggagcgctgggtcaggatgttttccagccagcggatggtgttgatgtccaagtggttggtcggttcgtcgagcagcagcacttcaggatccgagaacagcgcctgggccagcaatacgcgcagcttccagcctggggacacttcgctcatcgggccgaaatgctgttccaggggaatacccaggcccagcagcagctcaccggcgcgggattcggcggtgtagccgtccatctcggcgaactcggtttccagctcggccacggccatgccgtcttcttcactcatttccggcagcgagtagatacggtcgcgctcggccttgaccttccacagctcttcgtggcccatgatcacggtgtcgagcacggtgaattcttcataggcgaactggtcctggcgcagtttacccaggcgcacgttcggctcgagcatgacctggccgccggacgggtcgaggtcgccaccgaggattttcatgaaggtcgacttgccgcaaccgttggcaccgatcaaaccatagcggttgccggcgccgaacttgaccgagacgttctcgaagagcggcttggcgccgaactgcatggtgatgttagctgtggagatcaattactttacctatcaatgggttgcgagcgtgacggcaggtgccttcaggcatgcgtcaacagcgacatcaaggcgcgaaacccggtcgctgaacacaaaattttggatgtgtgttggaatttggcgcgcattgtcgcatatgtcaggcgacagttgtatggcgagcgaaggatggttttgccaaggtctccggcatggccagccacaacagcatcaaggcaacggctgcaaccgccgccaacgtcaggaacgccgcgttgtagccagcctgctgcaccacgaaaccggccaggctgctactgagcgccgcgccgaggccaaatacggtggagagggcgcccaggctgacgttgaagcgcccggtgccttgggtcaggtccttgacgatcaccgggaacagggcgccgaaaatgccggcgccgataccgtcgagcatctgcacggccaccagccagtaggggtcgctggacaaggtatagagcacgccacgcagcggcagtatcaggaaacctacaagcaacagcggcttgcgcccccagatatcggctttgagcccgaccagccaggccattggcaccatcaccaactgtgcggcgacaatgcaggctgaagtcagcggggtggccatctgcagattgatctgcgccagtttctggctgaccagcggcagcattgcggcattggccaggtgaaacagcgcgcagcagatggcgaacagtagcagcggttggttggccagcaatgctttcaggcccgagggctgttcatggtcggtgtgatgggctggatcgaaaccacgggcgacctcatggtcaatcgccctggccggcacgcaactgaccgcaatgacactggcgacggccatgaacgccatcaggtagaacaccaccaccggcccgaacaggtaggccagcccgccggccagcaacgcggccacggcattgccggcgtggttgaaggtctcgttgcgcccggtacgccgggtaaaggcgcgcggcccagtgatccccagcgaaatggcggaaattgccggggcaaataccgaggcggctacagcactggcggcctgggtcaacgccacccaaccaaatgaactgacaaagggcagcatcaggcaactgcccgtcaccaacagcgcggcaagggctaccaccgcacgtttgctgcgagtgcggtcgatcagcgcacctgcggggccttgggtcaacaaggcagcgatgccggccagggtcatgaccacgccaatgctggccggctcccattgatgcacggccagcaggtagatcgccaggtacggtccgagaccgtcgcgcacatcggcgagaaagaagttcaggctgtccagggatagagcgatgcgcaggtctgaatgacgggccacggtacgaccttcaagagcggcgttcaggggctgaacacgcgttggattaatgaccggtgggctgggtgataagtttcgcggtgggccagggtttcctcctgcgcgcatttaatttactttccaaagcccactggactgaatttctggagaagcaatggacatgccctcagcgcaagaggcgatcgccagcaatagaaatgcctgggacgaatccgccgggttgcacaaagacaccgcgacctgggcggcactgctggcctcggtagccgagcctgatttttcctgccttgacccgaccatcaccaccttgctgcaagaggtgggtgtaatgggcaaggatgtggtgcaattgtgctgcaacaacgggcgcgaaagcctatcgctgtatggcttgggcgcgcgttcggtggtgggggtcgatcaatccggggcgtttcttgaacaggcgcgggaattggccgaggtctcgccgcatagccctgagttcattgagaccgatatccaccatttgcccgagcgtttgcaggcacgcttcgatattgccctggtgaccattggcgtgctgggttggatgccggatgtggcgctgttcatgcgccaggttgccagtgtgctgaagcccggcggcacgctggtcatgtacgaaacccatccctttctcgaggtgtttgacccctgtggggccaacccgatgctgcctgccagttcttactttcagcgtgaacccgttgtgctgcaggaggcaattgtctatgaagggaaggatgagcggcccgggccgacctcctattggtacgtacataccctgggcagcgtggtcagcggggctatcgcagcgcagttgcggatcgctcatttgcaggagtacccgcattgcaaccgggaagaactttacgaacagtatgagcatcaggtcgcgcaaatgcccctgtgctttaccctgacagcgatcaagcgtgatggctgatcaaggtttgcgctggcaaaaaaacgcccgcgaggagagggcgggccaagtgattcactggagtaggtaggcctgaccttataggtggaaaagtgaaggccttgtgaaaatgccgtgatcaaatcggataatcacgtcttatgtgtccacctgtggcgagggagcttgctcccgtaacggcctgccagccaccgcctatctgcctgacgcccctcgttccaacatgtgggagccggcttgcctgcgatagcggtgtatcagtgacagattagttgactgacccaccgctatcgctggcaagccagctcccacatttgatcaagagcgccgtacgaaggtgcgcatggtttgccccgggccggtgctgaacacggtgggcctgggcatgccttcatccgctgcgataaatacgaaatcatcgccgtcgagccggtaactggcggggagctgcttgcctgcgtcatcacctatgtcgtccgtccaggtaatgcttttgggcgtggtactggcgtccagtacgaagcgtcctgccaataatacttcgccaccgaccgtggtcacttcgaagcgatcccctgcaattgtcgttatcgctcccggcgcgctgtgggcatccacggggttgagcacgccactgtcttcaagggcggtttgttcccaagtgccttgcagtgcgtgaaagtccgaggctgaaagcggtgacatgcaaactccttattgctgttcaaaaaaatgttcaattgtattgaggctgacactgttccacctgtaggcgaaatttttttctttataagacaggtatttgacagctttttcatgttgtattgactacgcttgcaaccagatcagtctgacatggctgtgtcatttggcttactcaccgaaatgaaaccgaaataatccctaagtttgtgggatatttcaggggactgagtggtcacatcgccattggtctgccgtatccagggcgttgtccctgatttttgaagtcttttagacttctgagaatgatggccttttagtattattttaaggtgttcttattttgaatcgtacttccccgcttccaccttccgcagcgtctgatgaaattgatttatttgaattgtttcacgccatctggcgacaaaaaaagctggtggtcgggtgtacgcttctggccggggtattaggcgcaggttatgcctttctggcacccaagacctatgaagtcagcagtgtgttgcggcctgctgcaatcaacgagctagacgccttgaaccgttcggaagtgtataagttgccgcctgccgatgcgttgctcaaagtaggtgcacagctggactcttatgatgcgcgcctggggttcttcaaggaccatgaggagttgttcaaggcgttcaagaaaccggggcaaacccttgagcagagctttgaggcgttcaaccgcaattcggtcaatctgattttgcccgatccgaagaaatccgattcgttgagcagctatattcgtctggagctgcaatacccgaccgacgtcgacggtgttgcgattctcaacggttttgtggactacgccattgccgccgagcgtcagcaggtgggtgctgacctgaaggtgatcgtcaataaccgcttgagcgagctcaagggcaagatcgacgccgcccgcgccaactacgataccgataaagaatcgaaaatcgccaagctgctggaagccgaccggctcaagcgtgcccaactgcaggacgagctcagcgctttgcgcttgcagatgaagatggagcgcaccaaccgcctggccgaattggccgaagcgatcagcattgccaagtccatgggcattcgtacgccgacaacgccgtcctctatggccgactccacccgcacgggttcgagccaggtcatgcgtaccgaggtgaacaaccagaagatcccgctgtatttcatggggaccgaggcgttggaagccgagcgcgctgcattgcagcagcgtaccagtgatgactttaccaacccgcgcattgccgagatcggcaaagagctgcaactgctggaaagcaaccgcgaggttgaggtgctgcgcaagcgtggcaatgaagacatcttcttgcaggacgtcgagccgcttcgcgctgaagtcgccaggttgcgtggtttgaacatcgacatgagcaacctcaagctggtgacgattgaccgtcgagcccaggagcctctgtcgccgatcaagccgaaaaaaccgctggtcatcgcgctgagcctggtcggcgggctgttgctgggcctgatgattgcgctgatccgctacttcgttcgcagccgcactcaggccgtcccttatacggcattaggcgatcgccgcgaggataaagacacaccgctgtaacccttcaaacaggcaggctcacgggcctgcctgcgcctacccccagcacactcagtagacagcttttcacaattcttagttaacctttggttacaaagtgtggctaaataactgccaatggacgcacgcaggcgattatccgccgggcgtgtcgcctgtatgtgaattgtgatttcaggtgctgcttatccatcctcggccgttgtgggcccgcaggagcagcctgttctctccctgacgtgtgacgaatcccttgaaactcatcattgttgctctctacgttgcttccattgcgtatgtacacctgcgtggtcgggtgcgacacaagctgggtcgccagcttagtgatcactcgacgttcctggcgccgatcaactgtttcctgtacctgttctccaagcagcccagccgtccctacctctcgcccagcgactttccagacctgagcccattgcaggagcactgggaagagatccgcgaagaaggccagaatctgatgcgcgcgggtgagatcaaacgctcggagcaatacaacgacgtagggttcaactcgtttttcaagaccggctggaagcgtttctacctcaagtggtacggcgacagtcacccctcggcgatgaagctgtgcccacgcaccaccgagttggtgcaaagcatcggctcgatcaaggccgcgatgttcgccgaactgccaccgggctccaagctggtgcgtcaccgcgacccgtatgctggctcgtaccgctatcacctggggctggatacgcctaacgatccaggctgttacatcaatgtggacggcgaaagctattactggcgcgacggcgagccggtgatgttcgacgagacctacattcactacgcggaaaacgccacccaacagaaccgcatcattctgttctgtgatatcgaacggccgatgaagtaccgctgggcggctgcgttcaaccgctggttcagccgcaatgtgatggcggccgcgggttcgcccaacgatgagggtgacaagaccggcggcctcaaccgtgccttcacccggctgtacaagattcgcctgcgtggcaaggagctcaagaagcgcaaccgcacgcgctactacctggaaaagtgggcgatctttgccggtctggcgctgatcttcattcttatctgacctggctcagggcgcggatcacccagggggttgcgcgcccaacttgtcccacatctttttgctgatcttctgccgattggcataccccgcccacgggtcgtccttcaaggcctgcaaccgctggtgcaggttcgccaccgtccactgctgggcgccgcgcagccctttcaaatcgtctcgactcaccggcaccgacacgggtaggcccgggcgtgcccgcactgagtacgccgccacggtactggcgccacgggcgttgcgcaggtagtcgataaagatcttgcccacgcggttcttggggccgctggtggcggtaaagcgttcgggcagttgccgggtcatgaattgggcaatggctttggcaaatgccttgacggtgtcccagccatcgcgccgcgccaacggcacgatcaggtgcaagcctttgccgccgctggtcttgacgaaagcctgcaagcccagctcatccaacactgacagggtcagttgggccgcttccagcatggctttccagggcagggccgggtccgggtcgagatcgaggacgaacaggtcaggcgtctcaatcttgtccgtggtggcgccccacgtgtgaaattcgaccgtacccatttgcacggcacccaccagggcgtccacgctatctacctccatcaggcgcgcatggcctgggtccagcgccgggtccaattgcttgatgtgggggatggtcatgcgctcagagtgcttctggaagaactgctcaccttcaatgccttctggcgcccgcagcaatgacacggcgcgcccgcgcagaaagggcaggatccattcgctgatatcggtgtagaactgcgccagttgctgtttttgcgtgccgctgtgcttgtcgataatgcgctcggggtgggtgattttcacgttcttcaccgttgcctgggctttaccggctttcgatgcctcgggtgccttgacggacttgaccgacttgaccgacttggccgcacgcggctgttcgtgaatgatctgcgaggctggcttgtcggtacgcaggcccacaaacgcggcctggcgcaccacgccttcacgggtccactcggcaaattgcacttcgccgaccaggctcggctcaacccagtgcacgcctcgggcctgggcactggtcaacggcttttgcagtggcgagtccttgcgctcaagcgcggtgagcttggcatagacacttttcagcgccgcctgatcaaatcccgtgcctacgcgcccggcatacaccaggcctgcctcatcgttgaccgccagcagcagcgccccaaagccgctgcgcgaaccttgggggcgggtatagcccacaatcacgaattcctggcgcaggcggcatttgagcttgatccagttgtcactgcgccgcgacacgtaggggctgccggcacgcttgccgatcaccccttccagggccaggtcacaggcgctttcgaaaatatcgcgctggctggcggcaaaggcttcggagaagcgcagcagtttgcttcggctgccggacagcgcggatttaagcgcagcacgacgctcttcgaccgggtcttcgcgttggtcgcgaccgttcaaaaacggggcatcgaacaggtaatagacgatgtccaggctgcagccgatatcgaatgcgttttgcagcgcctggaaatccggcagcccgtcgccattgaggctgaccacttcgccatctagccaactgtccttgagcttgagggcttgtaaggctttgcactgacgcggcaggcgctcggtccagtcgtggccgttgcgggtgaacaggcgcacttcgccgtcgcgaatgcgcgccatgatgcggtagccgtcgaacttgatctcgtagcgccagtcaccttcgggcgcccggtccaccagggttgccaattgaggggcgaactcatccggcagggcagcggtacgcttgggcgctttggcttttggcgctgccttggatttggccttggccttggccgtggcttttggcttacccaccaccgcatcgctgagcacgctggcgggcttggcctcgacaatatcgaactcagaggccgggcgcgcctgctgatcgttttccttgatcaacagccattgctctttgtcgccactgcccttgagccgggtgcgtaccagcgcccagtcaccggagagtttttcaccgaccaaggtgaatttgagtttgcccgccgcgtaggccttgcgcgggtcatcgtggggttgccagatgcctcgatcccacacgatcacatcccccgcaccgtattggccggcgggaatgctgccctcgaaactgccatagctcagcgggtggtcttcaacatgcacggccaggcgcttctggctcgggtccaggctcgggcccttgggcaccgcccagctcaacagcacgccatcaagttccaggcgaaagtcgtaatgcaggttgcgcgcatcatgcttttggatcacaaagcttaaggccgaggctttacgtttgctggatgagctgccggcgggttcggcggtgatcttgaaatcacgcttgcggttgtactcgctcaggggctttgccatgttgttctcccgtcaatggcaggctcaagaggccttgttattggactttttcgcggtgctctttttcgccgcaggtttacccgccaggctgcgtttgagcagttcggtcaggtcgatgacatccgcagatttgcgctcttcgccgccttcggcggtttccacgtcttcgatcttgccggccttggcctttttcgctaccagcgcccggatcttgtcctggaagctgtcacggtattcatcgggctgccagtcggcgctcatgtcttccaccaggcgcttggccatgtccaattcacctttggccagggtcggttttgtcacatcgctgcccagttccaattcgtccaggctgcgcacttcggcgggccagcgcagcatgaccagcaccagggccgactccagtggcatcaacgcagccaggtgttgcttggtgtgcagcaccacgttggccagcgcgaccttgccggtttttttcagcgcttcgcgcagcagtgcatagaccttgccgccgcgtttatccggggcgaggaagtagggcgtgtcgatgttttgcagggggatctggtcgctggcgacgaaggcgatgatttcgatggtctgggtggacttggggtgggccgagcgaatctcgtcttcgctgagcaccacatagcgccctttttcaaaggccacgcccttgacgatattttccttggtgacttccttgccggtggttttgttgatgcgcttgtagcccaccgggtccatgctgcgcttgtccagccagtcaaagtcgacgccttgtgaagaggtcgccgagaccagcgataccgggatgtgaaccaagccaaaactgatggcgcctttccagattgcccgtggcataggtgtgattcctcaacgaagagcctgtgtgctggtgactcgcagcgcagggcaaaagtttcggcggatagatgctcggacagatcgtgttacacctgatgagaaactatttagtgtcaccacccgaacccacggcgtagcgtgttatcgaaagcacgtagtacctggcatagagaggtttggccatgaacccttgtgtacgtcatcttgcagcattggcgctgggcctggccgttgggccatgggctcaggcgcaaaacctgccgggccgcagcagcgaccacggcccgattcaccgggccaaccccaacagcatgcagggcacccagcccaatgcacctgcggttcccagcattcagcctgtcccggccaacccgcggccgaccctggaaaacggcggcatcggcaaccgctaccccaagcaggaggcggcccccagccgcccggccaccgcacccaaagtgcccacctatgatgccaacggcaatcgccgctgaggatttcgccttatgtttgtacgtaaaaccctgatggccgccctgtgcgccaccgcgttactgccgttgagcgcggtgtatgccgccgatagccaacagttccccagcgagcaaggtagcatcaccgcaacaccgatcgccaagggtctggaccatccgtgggcgctggcgtttttgcccgaccagcaaggttttctggtgaccgaacggcctggaaacctgcggtttgtcagcccggacggcaagctctctgcgcccttgaagggcgtgccgcaggtgtgggccaaagggcagggcgggttgctggatgtggtgctgtcgccagacttcaagcaggaccgcctggtgtacctgtcgtacgccgaaggcggtggtgagggcggtaaggccggcactgccgtagggcgtgggcgcctggcggctgacttgagcggcttggaggacttcaaggtgattctgcgccaggagcccaagctatctacgggcaatcacttcggttcgcgcctggcctttgaccgtgacggctacctgttcgtgaccctgggtgagaacaacgaccgccccacggcccaggacttggacaagctgcaaggtaaagtggtgcgcatctacccggatgggcgcgtgccggatgacaacccctttgtcggtcagcccggcgtgcgtccggagatctggtcctatgggcagcgcaacccgcaagggctggccttgaacccctggagcggcacgatctgggaaaatgaacatgggccccgtggcggtgatgaagtcaatatcatcgagcgcggcaagaactacggctggccgttggcgacccatggcatcaactattccctgctgccgattcccgaagccaagggcaaaacggccgagggcacagtggcaccccatcatgtgtgggagaagtcgccgggcatcagtggcatggcgttctatgacggcgaccggttcaaggcctggcagcacaacctgtttatcggtgcgctggtcagccaggagctgattcgcttgcagttcgagggtgacaaggtggttcacgaggaacgcttgttgggcgaattgaaagcgcggatccgcgatgtgcggcaggggccggatggctttctgtatgtgctgacggatgaggatgacggtgtgttgtatcgggtggggctgaatcaggactaaacgtgtgggagggcgctgttagcagaggttgatccaattgatgccccgcgatccaagtgtgggagctggcttgcctgcgaaggcggtgtgtcaggcgctgaatctgttactgcaccaccgctttcgcaggcaagccagctcccacattggatctcacgctgcctacagaatcggggttatagccccagctctgacaggccgggatgatcatccgggcgccggcccagcggccaatggaatttgcgctcgctttccttgatcggcatatcgttgatgcaggcaaagcggttggccatcaagccgttctcatcgaattcccagttctcattgccgtacgagcggaaccagttacccgaatcatcgtgccattcataggcgtagcgcacggcgatgcggttatcggtgaaggcccacagttccttgatcagtcgataatccagctccttggcccatttgcgggtcaggaactgcttggcttcttcgcggttatgggcaaattcggcgcggttacgccagttcgtatccagcgtataggccagggacacgcgctgcgggtcgcgggagttccagccgtcttcggccagacggactttttcgatggcagacgtgcgggtaaacggcggcaggggcgggcggacttcttcttgggctgacatgggcgtctcctcaaagcaataaaggttgggtcgaaagttgcctgggctgtgggttcacagttgcagtaaggttcgcgccatgcattgcgcattatcggcagctgttgaatcacccatgaccagggcaacggtaatggcgccatcgatcaggatcagcagttgcgcggcctgctgctccgggtcgggggtgccatgtgcttggcacagttcaagtgcgtactcgaacagtttgcgtttatgggccttggccaacaggcgcacggggtcttgggcgtcaccggtttcaccgctggtgttgataaaggcgcagccgcgaaagtctgccgagccgaaccagcctttgagcgcgctgaaaagccccagcaggcgctcgccgctgtcgtcgcggcgttccacttcgctgcgcagccactgcatccagcgttcgtcgcggcgttgcagggcggccaccaccaactcatccttgttggcgaagtagcggtagatactttttctcgacacaccggcggttttcaccagtaagtccatgccggtggcagcgatgccgtggcgatagatcaacttctcggtgacgtcgaggataatgtcgcgggtttcattctgggttatatcgttcatgtcgagtacagtagaacgatcgttcttcatggtcaacagcgttttttaaattacccaccgcgagacctgagcagcctcatggtgtaagctttgggcctcttcggattcgacccattgcgagccctatgccgtcgttcttcaaacgctccctgttgcccaagctgcgcggttttccgttgtccaacgaggccattgaggtgctgcccagcgccgacgcctatcgtcgctgcctgctggagaaaatcgcccaggccacgcggcgtatctacatcgttgcgttgtacttgcagcaggacgaggcggggcaggaaatctacgacgcactacacgccgccaaggccgcacggcctgaactggagatcgtggtgatggtggattggctgcgcgcccagcgcgggttgatcggcgcgggcaagcaaccgggcaacagcgcctggtaccaggcgatgacccagcgccacgctaccgaagtgccggtgtacggcgtgccggtgcaaacccgcgagctgttcggcgtgttgcatctcaagggtttcgtgatcgatgacagcgtgctgtacagcggcgccagcctgaacaacgtgtacctgcacaagttcgacaaataccgcttcgaccgctaccacctgatccatagccaacccttggccgattcgatgcagcacctggtggaacacggcctggtggcatccaaggcagtgcatcgcctggacctgccaaacccgcccaccacccgcagcctgcgcaacgatatcggcgacctgcgcagccgtctcaagcatgcgacctacgacaccacagccgggcagttgcccaatggccatctgtcggtcagccccttgctgggcgtcggcaagaacaacccgttgagccgggtgatcctcgaactgatcgccagcgcccagcagcaactgaccatctgcacgccgtatttcaacctgccattgccggtgacccgtgagatcaaccgcgccctggcacgcggcgtgaagatcgacatcgtggtgggcgacaagactgccaacgacttctacattccgcccaccgagcctttcaaggtgattgcggcgttgccgtacttgtacgagatcagcctgcggcgctttgccaagcggcatcagccgatgatcaacagcggccagttgaacctgcacttatggcgcgacggcgataatacttatcacctcaagggcatgtgggtggatgagcgctacaccttgctcaccggcaacaacctcaaccctcgggcgtttcgcctcgacctggaaaacggcttgctgatcgacgaccctcaaggccaatggctggagccgcgaagcgccgagcttgcgaatattttccagcacaccacgcgtatccagggttaccagcaattgcagacactggtggattacccgcccgctgtcggcaaattcctgcggcgtgtcagccgggtgcggatcgagcgcttgctgtaccgcattctctagccgagcaacttatcggcaaaaaaacacccgggcccttggacagggactgggtgtttttttgtgcgcggccgttagttcaaacccagcttgccgcgcagggtcgagaggtcttcggccagggtgttaaccgggccgaccagggccttgcggtcgttgtccttgaccttgtcataggtctcgaagccgccatccttggttttgtacttggccaggatcttgtcgacgctggcaaagtttttgtcgaccttggccaggaaggcctggtcttgctgcccgatctggccacgaaacagctcgacgatttttttcgcgccgtcgatgttgccctggaagtcgtacaggtcggtatggctgtaacggtcttcttcaccggagatcttggtggccgcgacttcttcaagcaacgcagcagcaccaccgacgactttctccggcgggaaagtcaggccatcgacgcgggtcttgaggtcattcacatcggcgttgagcttggcggtcagcgcttgcaggccctgggtcgagttctgcgagaacagcgcgtattcaatgcggtgaaagccggtgaagtcttcggccgtcacgcctttttcatgatcgtccacacgcgaatcgatggacgcgtcgaggtcgctgaacagctcggcgatcggctcaatggactcataatgtacgcgagtcggcgcatagagcttcttggccgtggccaggtcgcccttattgatggcgtcggtgaacgcctgggtctgggtgaccagttcgccgatttcttcggtgacgtagatcttgtaatccgacaccgggcccaccaggtccaacggcgcagtagcggcgaagcttgccagtggcgaaaggctgagtaacaacaacgcgatagacgacttcttcatgggagacattccgctctggtgtgttttaggtcttggcaggattttgagagtgcgttgccgcgagcagcgtgcgcccgatgaaatccttagggccggtgaccccgggcaacgtgaagaaatacccgccacccacgggcttgaggtactcctccagcggctcgccgttgagtcgggtttgcacgctgataaagcctttctccaggtcagcctggtagcagatgaacaacaagcccatgtccagttgaccgtttttgttgacgccgttggagtagttgaacggccgccgcaggatcaggttggcctgggtctgcggggtgcgcgggttggccaggcggatgtgggcatcgagcttggtcaacttgccttcagggtccttgctgtagtccgggacctgggtttcatgctggccgtccatgggcgcgcccgtgggtttgatacggccgatgatgctttcctgttcttgcagcggggtgcgatcccagcgctcgacaaagttacggatgatgcgcacggcctggtaactgccatgggcggcccaggccggttcgtcgctggtgggctgtacccagacgatttggtccatggccttgtcatcgttggaattggggttggccgagccatcgcgaaagcccaggaagttgcgcgcactctgcgccggttcgccgggcttggacggtgcctggggcggcacgctgccttcttgcttccagcgcaccagcagcaggtcgggcaggtttttgacgatgtcacgcagggcgtggatattggtgtctggcgtgttggagctgaactgcaggctcaggtcgccatggcactgcgcgggctccagcgcatcgttgggaaaaccgaccatgcgactcaggcgcttgggtttggccgccgctaggccaaagcgctcatcgaacaacgattcgccgaccgacacggtgatggtcaggttatccggcgtgaccaccgggccaaggatgccggaatcggtaggcggcaatttcgggtcgacctggggcacggtgccgccggtcatcaggaacgcgatgcgctcgttgagggtgcggaacaggcgttccaggtcttcgcggtcgctggccagtacatcgaacgccacgaccatgccgcaggccgggcgcggggtgacgatgccgctttggtgcttgccgaaaaacgcttggtggtcctgggtcttgtcgctacgcggggccgtggtgacttgctcggccactgctgccatcgccgggcaggacaggctgctgccggcaatcgccgcgccggtggccgccatgcccaacaggacgcggcgacgttggaggtcaaactgttctttatcactcatgtatgcggtcgtcttcactgcaggccggaaaggccaagggcggggtcgattccatcgagtgcaacggccagtgccttggccttatcggcgatctgcttgcgctgatcggctgtaaccttgtcgtaggttgggtagcggtcattcaccttgagcccctcgagttcggtgtcgaaggcgttgagcgcgctgtcgatagtgggcaacaggtcggcggcggacttgcccagcaacgggcgcatcaggtcgaccactttgtgcgcgacctgcagattggcggcaaagccgttcaagtcgatgtggctgtagcgttcttcttcaccgctcgccgcacgcacgtccgccaggctattgaggttgcgcaccacaatgctcaccagttgctccggtggcagggactgggccagtaactgttgcttgagcgtggtgacgtcggtaaccaggcgctgggcgaccggcgccaggccatcgaggctgtgctgctggaacaggctgtattcgaggcggtggaagccgctgaaggcggggtcctgctcgcgcttttcaaagtagtcggcgcgggcgttgatcgcgttatccaattcggccaggcgttgagaggcaggcgccaggcgctgatacgcctcacgggccggcacatacatggcctgcgcctgggccagatcaccggcggcgatggcctgttgcagcgccgttacggccttgaccagggcactgccttggccgctcaggtatacgcgaaactcagacaacgggccgataaaggccaccatcgacggcttggccttagcctgggcgtcggactctgccgtgggcgtgacatgcaaggtgccacgcgggttgctcaacaggccacaggtaatggcgtagtcgccgggcaacaggttggcgttgatcacctggctcaggcctggggcaatattttcccgttcctcgaccaccagcacgccgtcgaggatttcccactccaccgcacggtcggagcggttgatgatacgaaagcttgcgcgcccggccggcacggtgagggcgttgggctcgcaggcgtgactgtgaatcgtgaccgcgatttcattgtggttggtctggcgcttggtcgcggccaattgcgaggcgtagtagaacaggccaccggcggcgatcatcaccaccaccgagccagccacgccccagcgcaaggcgcgggacggcggggccgattgaggggttgggttggacaagagacggtccttactggctggaaacggaagaggtgttggcagcgggctggctaggggccgagggcaggaagaacatcaccagggccaccaccaggtaaatcacataggcgcccagggtgctgacagtcggcgcctcctggtaaccgaacatgccggccagtaccgagccgagcgggctgtccatgggtaatgcagcgctgaaatcgaacagcacggtctgccagtggttccacacaccggcttcgtgcaaggcttgcaccgagttggcgagaatgccggccgcgaccaccaggatgaacaggccagtccagcggaaaaacgcgctaaggttcaggcgcatgctgccggaatagatcaggaaacccacgacaatggccaggaccaggccgagcagggcgcccaccggagcgcccgggccttcgctttgctgaaacacggctaacagaaagaacaccgtctccagcccttcgcgggccacggcaaaaaacaccatggcgatcagggcgaacacctgatgcctggagccggccagcgcatggtcgagggattcatgcagcgagtgtttaatcgagcgcgccactttgcgcatccagaacaccatggaactgaggatgcccacggccaccaacccgacgacaccttcaaacaattcctgctgcttttgcgggaattccgcactgaccaattccaggccgccgcccaccagcagcgccagcgctgccgcaaggaatacgccgatccaaaccgcaggcatccactggccacgcccggtctgttgcaggtaactggcgatgatgccaacgatcaaggcggcttcaatgccttcgcgcagcatgattaaaaaaggaacgagcatcgggcacccaggcgcaactagttagggagctaatttgtaacataatgatactcattgctaaacaagaaatattgacctttgctgaacgtgggctgaacagtggtggcgaagcgcaaccgcccttatgatgcaggccaaccacaccgcagccggacagctcaacgccccatgtcggaaaaagacaccatctccatccacctcgtgcgcgaagcgttgttgcacagttgcgcgccgggagccgccaccgttgaggcattgagcaaagtcgggattgccccggcgttgcttgagcagcccgacgctcgcgtggcggccaccgcctatgcacgcctgtggcgtttgctggcgcggcgcagggacgatgagttctttggcatggacccgcgcaagctcaagtccggcagcctggcgttcctgtgtcgcgccgccatggcgcaaccgagcctggctgcgggcctggaaactggcttggggtttctctcgctgatgctggagcaccttccggcccagctggtgcgccaacagagcctggcggagatcgtcctgctcgaacctgagcatgaacccaagcgtgcgtttacctacttcacctactggatgatcgtccacggcgtcgcctgctggctggcggggcggcgtattccgatcctcgccattgaactgcgctgcgctcagccggacttctgtgacgattatcaggtgatgttctctgacaacctgcgctttgatcgaccacgcacccgcatgatcttttcagccgactgcctggacctgccgatcaagcgcagcccgcaggagctccaacgttttctcgctcatgcaccggctaacatcctggtgaaataccgcgacccggaaagcctcgccacgcgcatcaagcacgaccttcggcagatgccccccgacacctggccggaaaccgaggggcttgccgccaggttgtgtatttctgcgtccacactacgccgccgcctggcggaagaagggcagacctatcagggcctcaaggacagcgtgcgcaaagaactggcgattgtgtggttggccgaaccccagatcagctttgccgagatagccacgcggttggggtttgccgatgcgagttcgttttataaggcgtttcgtaagtgggtgggatcgaatccggggcattatcggagtttgattttgagcgagacgagtcgcctctaacttccaccctgcgggattaggatgtttctcacttgatcgttcccacgctctgcgtgggacgatcggtggcaaaaaaaagccccacgaccgaatggaccgcagggctaaaaattggctggatgcgaccaaccaaaggagctctttacctcactggttgctggccaccaccgtatccggctgccagccaccacccaacgccttgtagatcgccacaatgccgcgatacagatccacttcggcctgggcctgggaatcttcggcggccaggcgttcgcgctgggcgtcgagcagtaccaggaagtccacggtgccttcgcggtagcggatcgcggcgaggtcggcggcggcgcggctggattcgctttggcggatcagcgagaccaggcgttgctggcgcttgccgtaatcgctgaaggcgttctcggactcttccagggccagcagcacttgctgttcataggtcgccagcgcgccatcggcttcggcattcgcaccgcgcaaacgcgcacgcacgctgcccaggtcaaacgcggcccaggtgatgctcgggcccagggaccaggcattcgccgcggccgagccgatctgcgaaccgcgcccggcagtgaagccgaggaagccgctgaggctcacccgtgggaacaggtcggccttggccacgccgatacgtgcggtggcggcggccagtttgcgttcggcgctgaggatgtccgggcgccgttgcagcagttgccccgggtcgccaatcggcaacgccttggcaatcgctggcaggtctttcgggctcaggtccacgctcagcttgtcggggcgctggccgaggagggtggcgatgcggttgcgctcgcgcacttgttcggcctgcagttgcggcacgctggcttcaaccgctgccaggcgggcgtcggcgcgttcgacgtcgagctgatcacccacgccggcgtcgcgcaggctgacggtgatggtgcgcgattcctgctggttcttcaggttgtccagggcgatgcgttcacgcagttgcgctccacgcagttgaccgtaagcatccaccagttcggcaatcatggtgacttgcagttggtacaggtcggcttcggcgacttgttggtcggcgtcgctggcttccaggttgcgacggatacgcccgaacaaatccacttcccaggccatgtccaggcccaggtcgtagcgctcgctgttgacacgcttggtggtctgccctggaatctggcccttgcccacatcgctgctggcccgggaggtgaccaccggcatgatatcgttggccgcatcatcacggatggcccgtgccgcccgcagacgggcgaaggccacgcgcaaatcacggttgccgctcagggactgggtcaccaactggttgagggtcgggtcgtcaaactgctgccaccagatgccttcgtatttggcgtggtcgtagcttttggtgtcggcggcggccgtgatgttggccgcctccagttgctgggtcttgtagtccgggcctacggcacaggcggcgagcgccagtaccagcaggctcggcaggaatattttcacactcattgctgtgtctccagcttcaaggccttggccgctttgcgcgcttcactgcgctcgacatagcgacggatcagtacgtagaacactggcgtcagcaacagaccgaagaaggtcacaccgatcatcccggagaacaccgccacgcccatggcatggcgcatctcggcaccggcaccgctggagagcaccaacggcaccacacccatgatgaacgcgaatgaggtcatcaggatcggccgcagacgcaggcggcaggcttccagtaccgcagcgagcgggtcgaggccttcctgctgtttatccttggcgaactcgacgatcaggatcgcgttcttgcacgccaggcccaccagtacgatcaggccgatctgggtgaagatattgttgtcgccgcccgagatgatcaccccggtaatggccgacagcagcgtcatcggtacgatcaggatcaccgccagtggcaggctccagctttcgtattgggccgcgagcaccaggaacgccagcagtacgcagagcgggaacacgaacagcgcggtattgcctgagaggatttgctgataggtcaggtcggtccactcgtaggtcatgccgttgggcagttcatctttgagcagtttttcaatcgcggcctgggcctggccggagctgtagcccggcgcggcgttgccgttgatttctgcggtgatgaagccgttgtagtgcatcacgcggtccgggcccgaggtgtcgctgaccttgataaaggtcgccagggggatcatctcgcctctgttattgcgcactttcagctggccgatctggtcggagtcctggcggaactgttgctcagcctgcacgttgacctgataggtgcgcccgaagcggttgaagtcgttggcatacaacgagcccaggtagacctgcagggtgtcgaagatgtcactgatcgccacgccgtgggtcttggccttttcgcggtcgatagccgcgtccacttgcggcacgttgaccgtgtagctggtgaacaggccgaacagttcaggcacgctgtggctcttggtaatcacgttctgcacttctttatacagctcgtcatagccgaggttgccacggtcttcgatttgcagacggaagcccccgatggtgcccaggccttgtaccggcggcggcgggaagatcgccatgtaggcttcttcgatattggcgtattggccgttcagtgcaccggcaatcgcaccggcagacatgcttgggtctttacgctcatcgaagggcttcaaggtcacgaacacgatgccgctgttcgggctgtttgtgaacccgttgatcgacaggccggggaaggcaattgcagcttccacgccgggttgtttcagggcgatctccgacatgcgcttcatcacgttttcggtgcggtccaggcttgcggcgtcgggcaattgggcgaaggccaccaggtactgcttgtcctgggccggtacgaaaccggtcggcgtgtgggcaaacccgaagaacgtcagcaccatcaaacctgcgtagacgaacaacgcaataccgctgccgcgaatcactcggcgcacggtgcctacgtagccatggctggccttttcgaaaaagcggttgaagggacggaacagccagccgccgaagaccttgtcgaggaacttcgagaaccgatccttcggcgcgtcgtgaccgcgcagcaacacagcggccagtgcaggagacagggtcagggagttgaacgccgagatcacggttgagatcgcgatggtcaaggcgaactgcttgtagaactgcccggtcaagccactgataaaggcggccggaatgaacaccgcacacagcaccagcgccgtggcgatgatggggccggtcacttcactcatggctttttcggtcgccgggaagggctccagacccagctcgatattacgctcgacgttctccaccaccacgatggcgtcgtccaccacgataccgatggccagtaccaggccaaacagtgacagggcgttgagtgagaacccgaacaggtgcatcaccgcaaacgtaccgatcaacgataccggcaccgccaccaaggggatgatcgaggcgcgccacgtctgcaggaacaggatcaccaccagcaccacgaggatcagtgcttcaaacagggtatgcaccaccgcttcgatggaaccgcgtacgaagatggtcgggtcataggcaatgcgataatccatccccgccggaaagctctttttcagctcggccatcttgctgcgcacatcgttggagatgtcgatggcattggagccgggacgctggaaaatcggaatcgcgacggcgggctggttatcgatcagcgagcgcagcgcgtattggctggagcccagctcgaccctggcgatgtccttgaggcgcgtgatttcaccgttggcacccgcgcgaatcacgatgttctcgaactcttcttcagtgaccaggcggccctgggtattgaccgacaactggaagctggtgtcgctcggcgcgggctgggcgcccagggcaccggcagccacctggcggttctgctcgcggatcgctgtgaccacatcggtggcggtcaggttgcgcgaagcggttttgttcgggtcgagccagacgcgcagagagtagtcgcccatgccgaacaactgcacgtcaccgacgccgcccaggcgggccagttcatccttaatattgaggatcgcgtagttggacaggtacagcatgtcgtaacgctgatccggggaggtcaagtgcaccaccatggtcaggtcgggggaggccttgtccacggtaataccgatgcgcgtcacttcctctggcagcttgggctgggtgcgcgtcacacggttttgcacctgcacctgcgcgttgtccaggtcggtgcccagagcgaaggtgatggtcagggtcagcttgccgtcggcggtggactgcgaggacatgtagagcatgttctcgacgccagtgatggcttgctccaacggcgcggccacggtttcaccgatgactttggggttggcccccgggaagttggcgcgcaccaccacggtcggcggcaccacttccgggtattcgctgatcggcaactggaacagcgagatcgcaccggcgatcaggatcaacagcgacagcaccgctgcgaagatcggccttgatatgaagaacttggaaaaattcatcttgagtatcccttaaccgcgtggagtcgcgacgcttgcgagcttgggcgcgggtttttccggcgccatttgctccaggttgctggcttcaagcgcttgtcgttgttgggccaaggcggcgagggtttccttgctggccatcgggatggtttccggcgcgaccggcgagcctgggcgcacacgttgcaggcccttgacgatcacggtgtcgtccttggtcagcccactgcgcacgatgcgtaaaccttcgattttcggccccagttccaccgcgcgataagccggcttgtcgccgtccatcaccagtacgaatttcttgcccaggtcggtgccgaccgcttcgtcattgatcaacacggccgaataggtgccgctgccgaccagcttcaagcgcgcatacaggccaggggtgtattcgcccttgctgttgtcgaacaccgcacggccacggatggtgccagtggccgggttgacctggttgtcgacgaagttcatctggcccaggtgcgggttgccggtttcgttggacagccccaggtacacaggggtggttgcgccacgccggccttcgcgggccagttcggtgtacttgaggaacacgcgctcatcggcgtcgaagtaggcgtagaccttatcggtggagaccacgctggtgagtgcagtggtatcggcggtcaccaggttgccggcggtgatttcggcacggctgacgcggccactgatgggcgaggtcacgcgggtgaagctcaggttcagcttggccaggtccaactgcgcctggatcccggccatggccgcgcgggcttcctgggcggcggtggtgcgcgagtcagccagttcggcggagatcgcattgctctggcgcaggcgctcgccacgttgcgcttcgttttcactgcgggtggcggcggctttcgtttgtgcaagctgggcttcgaggcggcgcacttcggcctggaacgggcgagggtcgatctggaacagcaggtcgcctttctttaccagcgcgccttcggtgaacgccacctggtcaatctggccggacactcgcggacgaatctgcacggtttccggcgcttcaaggcgcccggtgaactcgtcccattcgttgaccggttgttctaacaccttggccacgctgaccttggcaggaggcatggcggccgcttgttccggggacttgccgcacgcgctcatcaccaccacggccaagatcgccaaggggaagcgcaaatgtttaagtgactgttccatgaggtgcatccgccaatgtatttgagatgggcggatcatgcgcggggaggtgctaggtcacgaatcgaatgaagcaaaggtaactatcattcggaatgatataagcgnnnnnnnnnnnnnnnnnnnnnnnnnnnnnnnnnnnnnnnnagaaactgccttcaccctgccactggatagccattcggtgctgctatcgcgggtagctcattgaccactttgggtcgatagcagtcatcttcgaccagcagctatcgacccatagctgcctgtggagacggtcggcaatcggccataagcggcctatgagaatgtctacgagactcagggcgttcacaatgccgtccatcacggccgtgaggtgcctgcagtaggaggactgaaatttagaggggaggtagttgacgccgccgcctgccagaggtaatgctggctattggccaactcatattgttgaagggactctgtatgaacgagattgcagctatatctgaagagatggaagatttagaccaaatcgacactcccttaacaaaaaactttgaggctgaaaagcaacgggtactctttgcgatatccagaaatagtcctaaacgcttgttagatagagttgcttggattctgaatcactacactaatgctcgtgactcagatattgcttgccagctacattactggaaaacatttcaaggagatctctacagtggcggaaatattttgcaagagaactatcctaagcttgaacgattaaacagcatcacgcgggcacgggcaagagtacagaatgatcttaaaatgttcatcgcctctcctgaagttagaaagcgcagaggaaaactggaggatgaagaaaagcaacgtgcacttgaggaacgcccgaccttcccaatatattgcatatatgcggacgaaagtggtaagaccagcaagtacttattagtcggtagcgtatgggtattgcgaagctacgaaacgataaagataactaacgcaattaaccaaaaaaagcagtctattggcttcaagggcgaaatgcacttcaaagaaataaacaaaggtaacctagatacctactgtgagcttctgaacgccattatcgaaaactcctcctcaatctcatttaagggaattggagttctcagaagtggcctgacgaacctcgacgacacgcttaacaagctcttctaccacatggttatccagggtatcaaggaggaggatacgtcaggacgagctgttcttcccagaaacctacagttccgtaaagattccgaagaggagtctaaagataagctttcaatgatggagattgagcttcaacttagaaatgcagcaaaatctattttcaacgaccgcttgtatgttgacatagttgaagccgagaactctgaacgttctcccctcatgcagattgcggacctttttgtaagctcaatttcgcggtatttaaataaaggcgaaggagcagaaggtccaaaggatgtgtttgcaaaaaaattcctgcaatcattcggtgtgaatacaaactcccaagtattagatggttttagcgattgtgtccgtttctcccagcctaaaaaataactgcatcataccttcattcgtcgaatgcatggaggtcgcgtcagccctagggaagccgactcagtttgaggcattggagaggctggagtcggcaacatactttagtatgttagacgcgaccatagttcagtagcaactgatcgttgctgcatcaggccgtgagataaatcaatttgtggcagcttcgaatcagcttcagatactagatgcaagtcaccggcaaaaagctgtcgttcaagggtatatctaaagcttgagacgactcactccaattgtcagcttctcacgcaggtttttcaaagttattcaattgttctgagtcttccattctgccgcatctagcctaactcaaatgtttcactcaggcttctactagaagattcaatgccttcatacgcaatcgagtcgctgtcaaagacactctaaagtacttacttagcgctgtcgcgattttccagaaattatctacattgtcacgttgtccatccaaatacagaacgccatgccctcggtttcgaatttcatgatgcttgatcaaaagattcagtaccgtattgaactcatttcggggcataagcaggcatgaggcaaacgtgtttgcctgccattcaagtcgctcgatttccccctttggaatcgtgatgagctggctttgatcaatgtcccgagactgaatgctttcgcgcgtcatatatcgtccatggctgaggaaataatgtcctaactcatgggctagtgtgaacctggccaaggacgactgttcgtcggcggtgaagatttttatttccagggggctgaaagtaatgctacccagagctgagcggctctccccaataaaacgcacattcaagccattggtatttttctcatggagaacaagcttgttcagatctacatcgcctctgatgtagcatatcgacttcaatacccgttcagccaagtcttcgatgctgttttttgagacaaaggcaacacgcggcttggccgcaggtatgggcggatgaatcaatctcagctcattttcactgaaagcagcttctaaactgaggcctctccagataccgtcccacccatccgtgtaaccagacggagtgacggcgtatgcgctgtagatagtgggccgaaagtcaggatgtgttagagcatattcaatttccgcacgcttacgcgattttgcgctttgagctcctgtcagcaacgcacgaggaagctcccatcgaaactcagattggtcaaaataccgcagaaggccaaagcctctgttgcgagcaatgttgaacgtaccggactgaaatgcgctcatggaggcgaagatccctttgacgttgaagccggtaacctgactgacctttgagctgaactcttcaatgtcgcatacgggaacagtgccgctgtagtttttgcattctattatgatgatcatcgatggtttttcgagacccggcaggaacacctcgatcgaaatatcgaagatgatggcgtcgtcccgatcgcgtgagtaatagcctctttttctgtagatctgacagttctcaggtcgacagaagaagcgcccctcatcgatctcacgagacaggaactgaaaaacctgctcttcaaatttatcgcccttggcgtaagtgcttagcttctcaatttccatatttacgcagaaatcctgttgattgggctctgagaatagccgatagcgcagtagagtttcctatgcgtattgttgattattcgaggcgacactctagctgtcgatggagagcgactacttgataagccaattgaagggtggagtaggttcctgttcaatcttttccggtttgatatgtatcgttgagtgtcagcttttggccgaaagcagtcgcaaagtatttgtaattctttaggcaattccgtggcttgccttcattcgacatgatgctcgggaggacaaaaacggttcccaaactcaaaacgcaccccttgcagaatgcggtctgtagcctgaccgattgccatgagtaatggaacgccgacgggtttcggggcattggcccgcttgaatttgcatagcggtcttgaaaaccggcggacgttaatagcgtctccagggttcgaatccctggtttcccgccaagatttacacgaaagcctcgcgaaagcggggcttttgcgtttctgggggttgtctcagaaaaatctctacagactgatcgtttccgcatcatttccggcagtttccgcaacctagcgctgatcgcggtcagcgtgtcggcttcacaatctccccaacacgacggtaaaccgtctcggttatccgcttgtccgtatgccccaacaggcggctggcatcgcccaggtccagaatctcactggcagctttcgggcggatgtcacggaactgaaactgccgaatactagatgcaagaacaccgtcgcctgcctctctggcgatggcgattgctttgtcgcgagcatcgtcaaagcgtagccggagcatgtgcttagtcacctgcctgccgtcttcggtgattatcaggtaagggtttcgtacgccccgggagcgtctttgctctatcagccttgcaaccaaggcgcccagatcattgagtgcgccggcagcggttaggcgaatgcgtagtttcttcgatgtctttccctgggacacctgcaggaattcgttcacggcgtccgcctcccgcatggacagcgtatccgccgggcgctgagcagtcaggtaggccaggtccatagcgtcacgtagttccgaggctgcgactgcatacacggcgccccaaatttcctcggtggcgtagaagtcgcgcggcacctctttgttcttgcgcacgccggcggcggggttgttttcggtgagtccccactcccgcgcaatgttgtagatgtgggatagcagggatatctccctattggctcgaaccttggcggtccggttgtcccggtactgcgcgatgatctgtggcgaaactgcatcaatgggggcgtcattgaaagccttgcgcagctgtttgaggctcagcaaattgtcgctttgggtcttgggcttcttacctgggatgatctctcgttcataccggtcaaacacctgggccagcagggcgttcttctttggtaccggcttgcaatcaagctttgcccattctgccttggcgatatccaaatcacccccgagcgggatttccacccgcttcccgtcttcattcctcccgtcgtagtaatagccaacccactctttgccacccttcaacgtgcgtacgcgccgaatcattcgcggcggcaggtccctgtttgccgcctttttcgctcgcatctttttatcctactcgtgacaagtccaacgaccaggcttcggccgcaacgttttctgctgagggttttacgcctgccagcttcatccgggcgtatacccggcccactaccggccggcgcgcccgcgtcagcacgtacttccatccattcaggttgagccacgcgatctggcgcgacgggatcatatagccagtgattgccgcgatttcttcttcggcaagggtttcgctttgcatttccatggtgtgcacctctatgcctctggtatgtggagtgagcctgtgggccgagctgtcttgatgatttggattgccaggccgaaggaggtcagcagccaggcgcatgtgccggcgaaggcgtagagcagtgcctcgttggtgcctgtgccaacaaggtcaggcccagcccagaagaaccagccgagggttcctaccaggtacaacagggcgcccagtacagtcagggtgagtttcatagcgaacatgggggtgtcctagccgcgctggggcggcgcgtaggggattggagtgatagctttctgcctatctttcaaacaggaccgaagcggtgtacaaaagggttcaacttagttcgtgatgaggcatggacgtgtcacacaacttcgatgctccgatagcgcacgcttaccggggccacgtgatgtttctcaagttcgattggcgtcgcccgaacgaccagagccctgttgctgcaaagatcattgaacctgcacccatcaatggcttgggtgaggttgcagcagagttggaaggcccctggcctgactatccggcggcacttgatgatgcgatggcggcggctgagcgctgggtcgatagtcaattgccatgaagtaacgcaccggcaggcatgtagggggatttgggttagggcagtggtttgtgagaaagcgcatgcgctaggtggcgcgcgtaggtagagacggctcgccagtaggcggccatggggcctttgcggcgcttccaggagttctccgcctcggtgttggcctggtcgcgcaggtcgcgcattacggcttcaatccgcgccctatcttctgctggtagatccaaaagggcgcggccagatggcaactttaacagtgggttgatgtagcccatagggtctccttttcgaagtagaacaccaccggggctccggtctcggcgaccaggccatatgccttagccaggcggtagatggggtggtaactgttgagggagttgaggtgcccggcgatgcgttcacgccatacttccaagggcatcgccgccttgcttaaattgcacgggacgcaagcgggcatcatgttttcgatggcatggttcgctgggcggctcataacgatggcgccggtgtacagaccgttcacccgttcgggctcgcgccataccgcttccatgtggtcagcgtgccaccggtcacccagcagtacaccgcagtaggcgcagtgcccgccgtacttcaaacgaacttgctcgcgctcagctttcttcaagcgcatggccggccctcgcggcagtgatctcgtcgatgagcggctgagggagttgagcggcgtacccgccttctgaccacgaaagtggctcggactggcgaatcatttcgttcagtaggtcgaatgctgcgacaagctgctgatcacggatctcaccgtcgtcaggtagatcatcactgaagacgttcgaaggatcgatctcgcgaggcatgttcggctcacagatgcaaagctgcaggtctgccaggtcgatatcgctgtcgatgaggaagtcacgtaggctgtcttcgtcaaagaagtactggtcgctatcgaatattaccaacggttcgccagaccattccttgacgggcatcgctgcaaacttcgcttgtcggctttcctggtgacaaggcagtagctacgaatctcgtggatcggatgatctggattcttctcgcagtggcgatgggtggcgccacaccagcgcgccatatgctcatctttgccccagaagcggccatcagcgcctacccagccggtgacggtttggatgctggcagcttgtgggggttcgtacatcacgactttttcttcaggcatgacttcgtccttgccgctatagcggcttactttgaagggggaggggttaaaactatctatgccggtcaaagccgatagttgctaaggtttgactacaagcgatcagggaccgaacaaatggaaagcaaattttctaggcgtatcttgctgctgggctcacttttgatcctcagtgggcaagttcaagctcgcggcggaagaggtgggcggagctctcgcggaggtggacgcggcggcagaggaggaggcggcaccggctttctttggttcttgggcatcggtggcgtaattttcggcctcgttaaattggactcgtggaagaccgctcggcgaacagcccatgacaaagccttggaggaagcaaggcttgcagaagtcgaacgattgaaaccacccaagactgagtgggatgcgcttggcctatgcttactctgtggcagccccatggcagttcgaattgctaaagtaggcaggcgccggggcaccaagttcatgggctgcacgtattatcctcgttgcttaggaacccggaaaatagtggcccgcactaccggaaactgaagtgacgacaccggagctcgctgtgcctcatgctgccttcttttgctcgtctggcttgcgaatcaagcccaggcgcacgccttcattgcgaacaatcaaaatgtcgtcgccatagccccacggattctcgaaaccgttatccatcacgggctggaaatacccgtatcgcatcgtcttgccagtgagtacaaacgcaccgatagacccaaccaggctcttcagtgtgccgccgtgcgagaagccatcccaccggccttccctcgtaacgttgatgcggcccccggtgcagtcatcgaacagccagacgatgttgcggcggccattgagagcgaggtatgcatcgtgcccggcgcccttgttacgaaagaagcaccggccgcagctggcgatgaccctaaggaattcgttcgcagcgatgatccgatgtaggcgctgctggccgatggttttgttttctgtaggcatggggagtccttgccgggccatgcccggggtgtagtgctacgatggacccttcctataaatgggctggaccatgaccaagcacgatatttacgatgagatagaaggctttcaggtttggaactacatggagtgcgacaaggacaaggaaggccgggagacctggcgtatcaacgtcgaggtaaagcgtggtggtgaggtagtagtgccggttgttgcgggtgaccgaacctatgttgaccgtggcctggcgcaggttgctggtcgtgaggttggagcaaggctaattgctaaggtgtaatttttatggttattcaaacttggttggcattaacttagttaaggaggctttgccatgggtcggctgttagcaattttggggatgctgctctcagcgttgtatttaggaatcgcatggtggttgataggggatcgaattggcaatctttcaacgatggacttaaatgaagttggagattttctcgccggagcatttggtcctcttgcaattctctggcttgtgcttggatttttccagcagggtatagagttacgacaaggaacggcggctctaaatttacagggcgatgaattgaaaaacgctgtcgagcagcagaggctgttagccgacgtctcattgaaaacgcttgagcatgagcgcgaggccaggcgtgaagaggctattcgttatcggcaaagcctacgcccaattcttcatttgcaaggtggcaatgttgaatttaaagatggctactggatcgtagaatgtaggttgtttaatgacggagcccaaatatatagcttaatactggttcttaataacggcgaacatgcacatcatttcgcgactttcagagaattagatcggggcgaaagcgttgacttcaaatttaggtggccgcaatattctccggaagacgatattgtaatcagtgttctttataaggagcgcgatacagtagatggggtttgcaggtttgttccagatagtgttattgacttaggcggtgttggcttcgtacgggaagataagatccagtcataggttgagttattagtcaccgcagaagcagtcgatatcttccgcgagatagcaaaaatcgaaatcggtttgccgggatcgttgctcggcagaccatcccatcgttttatagtcggcacgatcctgccggaatacctggccgaaccgttcttcggtgcctgaccaccagatcactcgcgacgggtcatccatgatcgtcttgatcagcttgccttcgttcttcttccagcacaggtcgcagttgccgaagtcggaatctatggcgaggtcgaacggctgggccgcccagaacgcggcaacattctccttggtgacgccggcagtgtaggaggggcaaacgttgtcccagcgggtgccgcctcggtcattggcagccatcatgcggtgatagcgcttcggctcgtcgtatcggattccgacgacgcaatcccattcggtgtagccgagggcgcgcatgtgcttctcgccgatcttcaccttcaggtatgcggtgcacatgttgttggagaagtttggtagcaccggcggaaggttcttttctgccttccgatacgccgcgtagtactcgagcatcatcgtgaagggctcaccgttgcggctggccgtctcgaaatttaccagcttgtaccacggtgcatcgtcaggctggccatacacccggcaccattccatccatacgatgccaactttccagcgcttgtcgatctgatcgatgaacaccagcgtttcttcacgttccttaccggtgttttgaaagaaggcgtgaacgtcagcagggagctttccaccgtgggcgtcgaggatcttgcgtagcatctgcccgctggttcggcctccggagacgccgatctgggccgggccggtgattaggtagggattcataattgcctcagacagccgattgcctcgccggctggcgtgattcgttgatatggggtattacgggtgaccggcatggagccggatcaggcggcggcgctggccgcgtctttgattgccatgatggcgttagcggcctggcgcacgtagtaaaggcgagccatcaggcttgggcatggcttgctgatcgtcgactcccagaggtcgctgccaccgatcagttcttcgtgttcgcgcaggaagtcataggccagcaccacctcgctgtcgcggccatcggcgaaggtctcgacctcctcaactacatcagccagttcggcgaaaggtaagcgctcgtcgtctgcctcatcgcgctctcgcagccattcaacgagttgttcggcccgctccagggtggcacccttgttcgggatatcagaaatccattcaggcacttcatcgctcggtagttcgtaatcgatccggccggcaacgcattcgcacacggtgtcgcggatcgcgtcgaagtcgatcactacgcgcttgatgtcgccgtccagcttctcatggagatacccgtcgctctggtggcgcaagaagttgatgccgtagctggcgccgacgtggaagacgagcgggccgatatcgcccatcatgctcatgccgaagcgggtaacgcatatgtcgaacccgtagcagctgctacctggccgtgcgcagcgccatacctcaacgccactttcattcaccagctgggtgtattggtgctgggccaagtcttctgcgacgcgggcggtgagtgcggcgcttgcatgctctttcatggattatctccagtcaggcgccgccctccggttaccggatgcagcgagtagggtgggttatgctggtgtttcgatttcgtcttcaggctcgagtgggtcgtcggcgagcgacttcaggccggccgcccggattagttgcgacaccttttcggtgactacaaaaggtgtcgtgacacaattgagcatctgcgccgcagtttcgaagtcggcggcgatcacgttgcgcagcaggttctgaaacacttcctgttggttgttgaagccgtgctgcttcatcaggcgctttaggtcggccttgaatacgccggcgacttcaaccgtaaacttctcgacgcccaatgcagcgtccttcgctgctgccttctcgcgcttgcggcgctgcttcaaggctcccgccgtcggctgttgttcttcctcggccatggcctacctcttcgatttcatgtgctggcaaatcaagtcatgcctggcgccggcgttgtcgcacctggtagttgatgcggttcacaagggcatcaggtgtgaattttcgtatgtggctatgttgtgccatcgacttggatccgggctgaccaattcgctatttgggcggcctggatccagtcttttcggtactggaataggaggaatacggctatgagtgattgcagccagttaccatatcgaggtagtggcagagcccttctcagtgctttttaatgtcgggacgccactcctcgatggtgtccgagtttcaggggatgtagcttgcatccgtgatgttattcaacgtttgtgctgttgttgtggcatcgggggccgccactttaaaacccaccgtagaaatgttgcctagcaatgaacactttgttgcactgccgatggtgacaatcgaccctcctgaggcaggcggaagattaaatgtgttcatggcgaaacgtgtagagcttggattgttgatcaacaacgacccgttggcccgcgtggtttgattgattacgctattctcggaaaactcagaaaatccaaggcttccaatagaccctaagtaaaacgaccattccgtgacattgatcgtattgcctctagcccttagccccttccatgcagcagtcccagtaccggctatagcggaggaggcagtaatatggttgttaagcaagtcgatatttttaacggctgcgcttatctggattccggtattgatggacgtaatgttgttgccgacaaaccttgcctgtggtatttgccagtcaataccaattgagcctccgctgatgctatttccttcaatcaggggaggctgtgtcgctgtattgagctgggacctaataccgatggcattgatggacagcaacttcaggacgttttccgagatgataatttggccgtcgtgtgtaaagcccgtgaccgagccgatgcttatcgcgacagtgaacgagccttgcaagatattggaagatgcaatcagtctgtcagtgccgctgttaaagaaaatgcctaattgctgtattccagttatgttgtttccagtaataacgcagtcgcggcttgcgacggttgccgcatccggaagtaatggttgcccgttcaagcctatgtttgacgactctatcttgcagaagtgcaggacattgttgccagtgttgttgctgatagttcccccgcgagttccctgggagaagtctatgcaaaagccgccagtgaaggactcaaaattgttactcgtggctcggggccgataacagttagtagctaccatgccgtgaacgacaatatttcgaaggtcacaggtttctatccagatattcgagcagtacttggatccagtggggtccaatgcgtactggcgaccgccgagcagaccgatcaactgcccatctagggtacagttcttaagcccaacatcctcaaccgacccatcagcaatcggatcgatgataatcgcagagtagccacccgtgaatttgatgcctgagaccacaatattcttggcgttaactactctgaaaaaggcctgcttggtcgtgttgccccagattaattccgagctcgcaccttctcctgtaatgttctggccggtgcttagcgtcacggcggaggtccgattcggctcccgcccttccgggtagataacggccggtccaatcggcgctaccttgtatcgaccagacggaatatgcacaggtagtccagtgctgaagcaagccaggtacccggcggtatcgtcagtgattccgtcgcccttgcagccgaactgtttaagggtataaggcgtagcttggcaaagcttccaacggtaggtgccgttttcaccaacgatcacgcttcctttattgtccggtgtggtggcatcgttaggatccctgcgatagacacctccgcctccatctccaggcacgtaatatccaagcacgtaaaccgcctcactcgccgttgcaacgagtgccttaagcgctgagatattgtcgacgacctgactggtgatacccgattcgttaatgttttctagcatttcctttgctccttgatgatggggttttgcttgtttgcgatgttcgaaatctaacgtttccggcaaatttctacgatcgttttgggtagtcgatgccatgggcggaaatgatccgctcgaaggccttgttgccgatcgccaactttccgcagcattggcgacgagtatccccagttccaggaatgcacggatccgctcggcgtatttcgcgtcgcgggcttcgtcggtttccctccgcacaagattctgggcgcccccgcgggttggcggcttgaacgtgatgtcgtacctggcggcgtagttgtagataagccgccgactaacaccaagctcggcggccacctcggtcttggtgagtgttacgcccaactggtgtatctgctcaaccagcttgagccggtcccgtgatcggatgtcggtcttgtcgagggggagggtattcgcttcaaccttgcgccgaacgaatggcttcggcgttggtggcatccggttgctataggtgatcggcttgggcttgtagtggtacggctcggccacttcgatcttgccgccagccgccagccgccagccgccagccgccagccgccagccgccaggtactggtcaatagctgctgcaagttcgtctgatgctggccgtagtgcctcgaccaggcttaggtggttgctgatcatgatgccctcacttgatccgtatcgagctatcaccgcgctcaaggtgcgcccatgtgggctcttcgagcagttcgtgttcggcgtcctcaccggcatccattcgcttgcgcaccgcctcgttgtgatcgcggatttccttgagcttggcggcgatggcctttttgtctggcgtgatgcttgatttcacagaggtcaattcgtccggaactgcgtcttcgttatcaacgaccacccgttcacttcccatcgccagggtgatggtgaagagcggacgcttgatcgacttgatgttggctgcttccatgttgcggcgcaggtagtcgctgatctgcgacacgctgttggacttgattcgcttgagctcggccaagcgctcgatttcgttttcgatggctgtcacgtcgctttcgatattgcggcgcaacatgactatgttgtcagccttgatgttgaaatcgccttgcacctcgtccatggcgtgctgcaaagcctctttcaggccttcatcatcggtgtcggccatggcctgaagctcggcgagtttgccggtgagtgcgtagagctgggtcatgctgctgcctccgtgcctttctcaaggcttgctttgcgctcttcgaatgcgcgagtgatgcgtgcaatgaaggtaggctcattgcggcgggtggcttcacggatgtacttcacgttcagtagcttgagttcgtgtgtagtgacggccttgccgatggtctcgaccgcggaagcaagccactcgacacgctcctgtttttggcgaagcatctcggcgtctttgtcctccgccttttcaagcttgaactcctcggcgatggtgtcgacgtaggttggatcgtcgaataagcccatgtgaatgtctgcggcgaagccgagtggttgcatacacttgccaatagcgtcagtgagcgacttcttggacacctcccagtcggtcacgatttttccgctctgcaggtacacaaacggcgtgtggccgtactgcacgatggtgcacttctgcccatccttgcccaggtaccacagctccactttcagcgtgtgcagcttggcgttgatgcgcggagcatctggccactccttggtaggagcctggagcggggcgccttcgtcgtagcgatcctcaagcaccgtccagccccagccctcaccgcaagggccgaacacttcggtggccttatgcatcaggtaggtaggtttgatggcggtgcctttaaagccgcccatgccggtgaagttctttgttgcgcttggatcagtggtatcgacttggtcccaaattcgcgtgtttgtggtcatgagagatccttgccgcgatgctcgcagcgataaaaggggaaggggaaataagagttgataaacgttcttattcgtatttaagatacgtaataacatttcaactcaacgcaaggagcctcacctatgaaagtgctgtcctcactcaaagaagctaaaaaccgtcaccgtgactgccagatcgttatgcgccgcggccggatctacgtgatctgtaaatccaatccaaaattcaaagcgcggcagggcagtgcgaagaacaaaaacaagggtaaaggctgatcagcttgcttgctgatcctgctgctgaacccggtagcgcaggacctggagcactcgaccgccgtagcctggttctgcgaattgctcaaccggtggaccgaagaaaccacgtcgttcggccaggctgtaggcctcgcgcaggttgtgagcgctgatgtcttcaagctgctcgtcgatcagggatttaaccggtgcggtactcattgaatctccttacgccgccggctgacatccaggaggcgtgcgctataccaatgaaattcttctgcgttgatggcgcccgaagtaaagtggcggacgatcaaaccctcagccaagatctcgtcgagagcgggcttatctggatcttcaagcgcaaacaacgctttatcgatctcaacgtaggggctcacagttcgttgtcctcggcctgggcgataagagcgtcatcagccaaaggttgaaggaggcgttcggcaatctcgcctagttttcccagtggatggtcgctccggccgagtagctccagagcttccgatttcaccctcgaacccgccatccctgcgatcagtaagtagcccagggctggagtgtcgacgccgcagtcagcaagtaggttgttggcgtactcatcgacagccagtgcgaactggtaggccgtgacgccttgttgtgggtgcaagtggcgcttgaacatcacgctgccacctctggccagctcttcggctgcgttgtacagccattcgctgcgagccaattgctgagcggcttcgctcaccggaggcggtagttgttcgtcgtgctcaaactgagtcttgcgtagtgctgacatggtcgcctccaaagtggcgggttgttcacctgtattcgtcaacactcatgcttcccgctggttgccgatgggcgcgggggaggagtgctgacgtaatagaggtggggaagggtgcccaggcccgctactggcgacggcctgggtttgttgcatcagcggtgtggcccgttgcccgctgttgattgcagggctggccgttcgtcttcgtaggttggcggtgagcttcctccccagggcgtcaatcagcatctgttcgccttggatcacaggtccctacaacatgcacgctgcagctcgtttacccggttaggtgggcagggtgcatgaggtccggcgttcccagccgaagctatcgggcccgctaattcaaatcttttggagctggccttgacccgctactggcgtcggtcaccggcttgaatcaaatgtcactccagccgcgggcctttcggcttgttctcccgctggataactattcttggcgctttacgctgcacgcccgggtcagttgccaaccctctgaaccgtttaggccggttcatcgctgcctttgaatctggtccggtggtgatccggcaatgggtatcgctaaagaacggcgcaggtttcgctgctggccgacattcttcattgctggcttgaggcgataatcacagagtgtgtttattgtgtcaacacgtaatgtgtttatatttttcatgattgaatcacgatgtgtggtattgattgggacggaggtagcaggaagcccgcctaccggcgagctcatttaggaatcgcagtactcgcgccagccgatcctgacagcgccgccctccaaatgctcgatccttatgccagcggtgtcgccgatatcctggatgacctggtgccaggcttcagggctttcgtcgtcgcgcttggatacttcgaccagttgaatcctctgtacccgaggagaggcgatcaagccttgcaggcgtcgaccgacaagctcgtaggaatttcgtggttttgatggatagtagggtgcctgaatcatgcttcgctccttgcgaaatctgtatgcatgcacagtattgttgttggcatcttattggcaatagggtggcaaggagtttcatgcataaatgcataaaccgcttggttggagacgccctaagcccagaaaagcccagctctgtggcggggtgtctaactgccatcattcggatacaatgcgcgccggccgagcatcggccaagccaatgaaggcgctacggagtgatggtatgaagatgggaaaggcggcgggagtcgtagtgcttattgcaatgattgccctgggcggctgcgcaagcattgtcagcgatagcaagccgaaggttgggttgtacagccttccgacgaatgccaactacgtaatcaaggacagtagtggaggtgtgctgcataagggcgtcactccaggttccgcgattttggagacgagcaggggctactttaaaagccagagctacaccgttaccttccaaaaagacggctatgcagaaacaactgtccctctgaagtcgactgtaagcggctggtactggggcaacctgcttattggcggcttgataggtatgttgatcgttgatccgttgacaggtgccatgtatacgcttccagaagacgctactggcaagctgagcgctgtaagtcttccaccttctgcacagccgcaagcctcggtgacgtcgcaataatctacaggcatgaaaaagcccgcgcgcgacgggcttatctattaaaattctcaagggttcgacttagttcagcctcccaagttgaagccaactttttcgcacttcacccgagcaaatgcctttgggtgtccacccacacgagcgctatttgtctccatgacttgatcgccacgcagcatgaaaaaccacaattcttgccccgcatagccgccataaatattctttgcattcacgatgacgcacatcccatacccgaatcgaagcccaaagatgccattccacatcggaatagggtcacccagaaattgatactttgttgagtcgggatccggctgagtccgtgccatatatgctttgatcgtacgatcgtagtcgaatggataaggtccatagtccggattttcaagctgctctggagtgggctttacgcacccggtaagaagaagcgaggcggcacaagcagcgagcaatttcttaagcatgagggtctctctctgactgagccagcaccttaccattcgtggcgtacagccactactggcgggcaggtaatcaatcaggcccttgtgccctcaacctagccaacccctgcttgatatgcccggcgttctcaccgatcgtctccagtgcaccgcgaacattgccgccagcctcgacactgccttggctttcgacgagcaatgtcagctccataagtgccgcttccagggcgagcgggttctcgtagacgcgttcgagcataagggggaagggagtagggggagggcatggcgtcgtctccaattgagggcctagatagcgtagaccaccgaattcaaggcaaagaaaagcccgcgatggggagtagcgggcttaaagggatgttttctaggagctgtggtaaccataagcgcccgactgtgaaagggatgtgaaaggttgcgctcagtaggacgtcgcgattgccttggcgagttgcatatcggacatgacgggagccttagacctcaatcggtagtgtcgggatgcttgctcaaactgtgcgccgcgaatctcgccgtccgaaccaatgaacgccagggcgtcagtcttggcggacttaaaatactctggaatttccgaggtaatagccgtgggcgctgagatgatcaccgcgggcactatggtagtggtcattagcgcgccttggaacgggttgttgttttcggctgcaattgcctgagtgctgcttagcaccatgacggcgattgccaggttcttccatgagtccattcttcgttgcttccattgcgtccagggagcgccacaatagcagagcagggcgcttgccagaaacaagaagcccggcgctgggccgggcttggtactaacgggtgcatgaatctatatggggggctcagccggcatcggataaatacagctgcctgatcacaccctcttttatgctggccttacctcgcacttcaagcttttcaccagatgcaaaatgttgaatataaacatttgcactcgactcaaaagcggggtcagttattttggcgttgacacggctcgttccatcgtcatccgcttcaggctcgccatcctgtccgagaagcctgaccttcgctgttcctcgctctctatccatttccgtgatgatgaccacaaaggatttaaggcctgtgagctccgcgtcatcgtcatccgcaaggatcgcgtctttggttgcctgatcaatagatataggctgcgctcccgattccggactcgggatgatgtcaatgctgcggcacgtctgcccgacaggggatacagcttgtttgagtgatgatctcaaactttctgcaagtttctcgatagtcagaagcaaccggtccgtagtcttatcattacgtccagtttgtgaatcgagctgcttttcaagcagctccctcagatgcttcatttcttcgcccttgttgctattcctagcaacgatataagagacaatagcggtaatgatactgccggctaagccggacattagctgtgactgcatgacgctttgcagctcaacagctaactgaaagcacttggcctttggctcagttgcaaaagccctgacttcaagtgcttgccactgcttggcgtaggacccggtagccacaaaatggccgacgacgctgtagattcgaccaaatccttgcattgattcacccagagccatcatgtcaatgacatgacgatctgcatcctttccctcgtaacgaatcagaagactgtcaacggtgtaaaggtcggtgctttcgttcatcgtaggcttcctttccaaaaaaatcatcaaaaactgtatatataaacagtgctaatgtcgcgcatgtttggtttttcgatctctatgacttgagctagccacctcaagacagcgaacggatgaaccaggcgataacccgatttatgcatgtttccgaatcgaggtacccatccgggttttatctgccgctatagaaatggtttagcgctatcagctcaaccacagccacgagggtgcagagcacaacgaagccagggctgaagacgcgcttgcgatgggatgaactgccgtccggccaaattccagcctcggctgtgaaaaccaccatgggcgcaagcagggcataggtccacaccttgttccaaaagctctgctctcgccaagaggtcgatggctttccaagggcggatggcatcagtaaaacttctgcagtgcctgcacaaccacgcccacgatccgacagttctcgtcgaccgcctcgatggggtagctcgggttcagtggcttcaggaaaagccggccgccatcgctcaccagcttcttgaacgtcgcctcattgctatccggtagcttggccaccaccagcttacctggtgcaacttcagcttcagtgtccacaaggatcagcgtgccttcggtgatgctctggccggcgggcgccgtcatcgagtcacctttcaccttcagccaaaacgcggtgcccttggagtcgtactccgagaactcatagctgtccgagaatccagctgggtatggctcaacggcctccgcccaggcgccggcggcgacccagctgattactgggtagcggaatgatttggtgggttgggcggcgattgaaatattcgaggggctttcgccaggcaaaagcagcgctgccggatcgattttcagttcatgggcaatcttggcgatatcgtcaaggtttggctcccgagcatctttctcatagtttcctatgcgcgattgggatttccacccgcatgcctttgctaaggcagcctgagaaagccctgctttttctctgtagtgagcgatgcgcgatccgagtgtcttcatggatcgaattttaatcacggagtgaaataaattccgcacacttattgtgtttgccaataacacgttatgtgtttatccttggtttaatgaccgcaggagcaacgcaatgaacctcatagcagagtttcgtgaagaggccggaatcacccaggcagccttgcaccgaaagctcaactggaagcagtcgcggctcgctaactacgagtcgggggcacgcccattgaagcttgaagatgcccggaagatcgtccaggcgctgaatgaattgggtgcgaaatgcactttggatcgcgtttttccgctgcaatcttctacggatgttcgggccgcctaagcgacatccctgtccgccgttccattgaagccagattagaagagagtagtccccatgcatacgtccagttccagacacatcgtacaaactcgtgatcaggtgctggtcgcccacgctgcaaatcagattgcgcgcaccagcctgagccaggacgacttcgcccaggcgctgagccgcgagcttcacctgtcgttcccggagaaggctatcgccaaagaggtgccggacttcgcagcgctgaccttacagaacgacgttgccgacttcgtgaaggcgactggtcgctggctcaaacgtgttcagcgctggctgtccggcgatcaggaaatgccgtcctggctggaggagtcatgggtcaacgcccttgagcctgaatttcgcgaccactgcgtaaacgagttggcaagccgccacggcctgaccggcgcccgccagatgaccagcgaccaatgcgcaaacaagagcttcggcgcgctgatccgcgccctgggtgatgtgatcgacaccggcagcgaagtttttgacgatcaggtgatgtgcgaactggatctgccgcacctaccggcattcgccaagcagtgccgccaggttgaagcgaaggcgggggagttggggcgccgtgccgagcagttgctcgcttcagtccagcgaaatttgaaatctgtttcctgatttcccgcgcatgcgcggaaatcggtgcccatcgggttcgcactatgaattaagcggatctgaaacccaggcacaaaaaagccgacggtcgaggtcggctaattcgataacactttgtgaggccgattatatgcaaacccagccacatatcaatagcactactaatctcgcgccacgtttttcgcaatctgaaaacgtggcgcgtaattcatcagtgatcccgttcgacttcgacggcgccgcaatcagggtaatcaccgacaagctcggagatccgtggtttgttgcccgcgatgtcgctgacgccctcggctactccaagcctgagaacgccgtggctcgtcactgcaaggccgcgaccactaccccgaaacagggtggtggtttcatgaccatcattcctgagcgcgatctgtaccggctggtgatgaagtccaagctcccggccgccgagaggtttgaggagtgggtggtggggcaggtgctgccgagcattcgcaagaccggcaccttttccgcccagggcccgaacaactccaagatcgtcggtgagctggccatcctggaatgcttcgaccgtctgctgaagccggccaactccagcaagatgatgatgctggccaagatcgccgccaacaacgggctggatgccaagttcctcccaggctacgccgtggacgccgaaccagatgccgcaggcgggtcttcgatgccgaccaaggcaatcaccgcccttatcaaagatcacgccatcgccagtactgcccgtgccttcaatattgcacttgaggcccacggcttcctcaaggtcctccagcgcaaaaactccaagcaggaaatggtcgacttctggtccgtgaccgagaaaggcatggcctacggcaaaaacctcaccagccctcaatgcccccgcgagacgcagcctcattggtacgtggatcgcttccttgaattggccgcaaaggtcgggaaggcctgacatgcaatacaccgtcacgattaaccaggtgaaggcgctggagtgggggctgaattctcagcaggccctgctgttcgccttcgtctacggctgcccgagctggaccaagccaatcaagactgatgacgggatcttcttcgcgctgagcaaggccaagatcatcgaggagctgccgctgctcaccgataagccggacaccgcttaccgcatgctgaaggccctggaagaggccggtttgattgagctttccagcacctcgaacatcacgcttttccgcctcaaagagaaggccgtcgagtggaaccagaagctcgacgggtcggaaaaatatccgaccccaccaaacaataagggtcggaaaaaaatccgatctacctcggataaatctccgagcaaggtcggaaaaaaatccgggcaagggtcggaaaaatctccgacaaatcaggataccaatcatcagggtaccaatcaggaaaccagtcaggacttgcagggcgccaccggcaagccggctcagtcccgcagcttggtgctggtggtggatcgcaccgacactcctcgggttgagatccccgccgacatgcccggccccaaagaccagacctgtaagaccttcaaagtctgggcgaactacgccatggcttaccgcaagcgctacagcgcctggccggtgtggaatgccaaggtcggcggccaactcggccaactggtcgaccgcctcggtgccgacgtcgcccaccacgtggccgctcacttcctgaaaaccagcgatgcagctgttcttcgcaagtgccacagcctcaacgagctcctggccaacgccgagagctaccacacccagtgggtaaccggacaacgcgttaacggcacaaccgcccgccagatggagcggacagaggcgaaccactccgcagcagaacaggccgcccagatggttctggccaaacgccaagcaggtgaccgcaatgaatacctctgaaatgagcgaccagcaggtggccgggctggccgctgccatctgcgcaaccgccgaagccatgggccaggaaatgaacccaggcactgccgcgatgatggccgaagacctctgcgcctacccggtacccgtcgtcaaagccgcgttgaaggcctgccgcttcgaggtgaagggcaagctggcaatggctgacatcctgcaacgcgtccagtcctccgacggccgtccaggcaaggacgaggcctgggccatcgctatgaccaccaacgacgagtttgaaaccgtggtgctgaccgatgaaatccaactggcactggcagtcgcgaaacccatcttggatggcggcgacaaaatcggtgcgcgcatggcgttcatcgacgcctaccaaaggttcgtgggccaggcccgcgaggatgcgaaacaggtcaactggcacgtgtccgtgggcttcgactccaaccgtcgcgtccaggccgtcaccaaggctgtggagctaaagcgcattccccaagagcacggccagaagtacttggctgatctgagcattgttccaattaccgaggatggccgtgccattgccggtttgctcaccggcgccgtcacccaggctgcgccagtgctgcgccagaagctggagctggtcaaaaactcgatgctggagatgcgcaaggccagcgccgaacgaaaaaccgaaattcggattgaggcggccaatgagctggcggaacgccgggcgctgctgataaagcaagcccgcgaactcgacgagaagagggcggcgcaatgagcaagccagccaagccccgcccaatgcctgtgtacctggtgctgcgccgcctggtcgatccagccacgggcaaggaggtggcagcgttcgtgccgtcctccgatgctgaccggtcgatcctgcgcgagcgtgaattcaagatgaacgcgaagatccgtgccgacctcaagcagccacgtaatccacggttcaatggcttggtccatggcctgggccgagtgttgagccagaacatcgatcggttctctggcaagcagtcacacgacgccatcaaggcgttgcaactggagtctggcgtgtactgcgacgaggaactgttcgacattcccggcctgggccagctcacccgcaagacaccccgcagcctttcctacgattcgatgggggaggagacattccaagatttctggcgccagtgctgtgcgtacctggtactgcatgactggccgacgctcacggaagagcgcctgaccgaaatggcagagttcgaagcattcaaggaggccgcatgaggcgcaccccattacaacgcaaaaccccgctcacgtccggtaggccacgccggaaacgctgccctgagtgccgagtgatgttcacgcctgcccgcggctcgcaggcggtgtgcggcgtgatcgagtgcgccatctcctacggcaagtcacagaagggccaggcgagcgccaagaaggccctggcggatgttggtcgccgcgacatcaaggtccgcaaggagaagctgaagagcagggcggagcaccttaaggacacacagcacgcattcaacgcatgggtgcgcgcccgtgatgcggcactgccatgcatcagttgcggccgccaccatgaaggtcagtatcacgcaggccattaccgcagtataggagcgaacccagagctgaggtttgaaccgctcaacgcctggaagcagtgcgccccgtgcaataaccacctctcgggaaacctcatcaattaccgaatctcgctcctacagagaattggcgaggaaaaggtggaatggcttgaaggccctcatgaggccaagaaatacaccgtggaagagctgaaggcgatgaccgccgaataccgggcaaagaccagagaactcaagaaggggcaagccgcatgaagctgatcaacgcaagacaggtatggaccgaagcacaacacgaatcgaacgcgtcgatcagcgctgtggccatcgacagggcggagtcgggatcagtgaagacgggtgggcgcatcggcaagcgtgacgcccagttcccggccatgggcagcgataaaggggaggaggctgggcgcttctccgtgcctgggcagcggatcagcatcagcgaaacccggcgcacatccgctggcaagtccacggcccgagctgcacacctggcaaccatcggtaaagtcctgcgcgccatcggcaccctgccattccaggagcaacagttcgggcactacctgtatcacccatgcatgacgctcgcccacgtgctcaacgccgagaagctgatctggaactgcgtggacttttccgccctgaccgaagccaaggaagcaaaggtgcattgccttgtgacgatggccctgcagtcctacaaggtcgaggctcacgacggcgctcagtgggggcccgctcgtatcgccgagggcatgctcaagctctacggcgtccacatagagcccaaagtgtgggatcgggactggaaagaagcgtggaatttcctgcgagacgccattgaggaagtggttattcgtgtacagcagccggtgtggcaggtcattcatgcagaaaaagaagaagttgcggcataaaggtgttgtcatgttggggtttttgatgtactttccccatagtgcacaagtaacgcgaaacgcacacgaaaccatgaacccggccaagcgccgggtttttgttgtctttgatcttgcccttgcttacattggcgcctctttcagctataggcacggacagcatgattaattcaaaagagcagttggaaaacgttgtagaaatgttcagctttttccaaaaaaactcgcctctgtcaatgggccgctatttggatcttcagcttcctgagcgtcacatagatcaacaacaagcgcagtatgcgcaggtgttgctggatacgttcaagcttgttgatggggacgacttgttcgatatcgatcgcccgatcaatgagggctctgtcatccgaggcctcagtgataatggtaaagttgcttgcgcaatgctattgcgtatggccgctgcaaaaggcatcaggtaaccgaattttcttgtgattgagcctcgctgttagcggggcttttttatgcctcaaattcacctgtagccaggacagcccttgggaaggcctggacgtcgatggccgggcagtgcgacgtacgagaacaaccccggcagcccgcgcactcatacctcaatgcttatagggtggcgcgagacaggaacggggagatcggtgcattagggcgtcgacgctgggatcgtctttggcagacagcgcggaaagacgcgcacacctattcagggcttcaaaagtctttttttctgaaggattcgtcacccgactgatcattgctgatcgtcagcacgccattggacaccgagtatgtagttgaggcgtcaccctcagaatattgattgcgccaacggccccactgattttcatcctccataaaagaggaccagatcactcgatcttcgctcacctggcagcgataacggaatgaatccccatccgggcggcggtatgttatttcggggtttggctcagcgtgcttcgttttcatggttttggttgggcgccccatctccactgcgatagctgctttgcatatgtcggcctttaagaaggattcgccgtgagcgccggcgacgatcccaatcgatgcgagtaatcctgccgcaatttttttgttcatacccttgtccttggttagttggcaggggaattctacatggcttatagccattttctcatgccccacggagtcgagcgcatggagtatctacagcgcctgctcgacaagatcgacaggttcgaattgctgattgcgggcctcgttggggcagtgatcgccagttggtggcacaaggacgacttgaacgactggcgtgcctggatgatcttcctcatcaccggcatggcctgctcgatctacctgacgagtatggtcagcacctacctcggcgtgaccgagccgaagatcgtcgccggtatcggcttcctgttgggtgcattcggcggctcgctcctggcggccatcaatcgagccatcaaatccgctgatctctgggcgctcattcgccagcggttcgggggaggcaatccgccatgaatcttgaactgatcaactccatcgcctgcggcctgatcgccttctgggcgacctggtgcgtactgagtgggaaggtgagggacggcatccttgggaagctgatctacaccacaatcgccatcactggctttgtcgtgtcggtgcgcaaccaaaacattttctttgggccgactacggcgggcctgacgctgcatgtcgccctggccctggccggtgcccgccacatcttcatggtcacctactggcaggcggtcaaggcctggctgtgcaagacactcaactgcgagcaatgcattggctgcccgaaggcgcctgaaagcatagaccagcccaagcagtaatccgcgccacgttttcgaatgcgccaaatcgtggcgcgaggttttgcagatgagcaatgtcacacgcctgcgccacgcactgccgatgagccaagacatcaacgctgcggtagtcgctctcgacaaggccattgctgatgcagtggacgccgccaaggaagccgggctgccccagggcctaatcgttggcttgctccacggtcacgcgcatgcacaggcacaccaaatggtgagcgtatgaccgtcaaggttctggagttcaagcgggaggactggcgcgacgccgccaagaccctgcgcaagatcgccgatgacctggacgctggagagcatcccgagtgcaccgtaggcgctttgacgctgatcggtgccaaaggagaggtaacagtgttcggcctcggccctaagtgcgacgacttgcaatgcctcggcgccatgcgcctgggtgagcagaagctgattggtgtgctactggataacgcggaagggtaggtgtgccgcaggtgagtgcggcactgatgatcagcttcggaagggttctactttctggggcatagctgggaaccacagccagtcgccctcttgcactgggttgttgaagttgcgcttcacctcgaacacccgatcatccccgttgcttccggttaccgaaaggatgtgcgccgattgccagcccttgaatggttcggtcttcagaccaagccagcctgcgcgcagcaccacggcgctggtattgtctgcgccggtgtaaatggtccgttcgcctgggttaaaggtgaacggaacaccgatcaatcgaaccgtttcatgatctgaatagacctcaacatctgcagtagctaagcccatgttgctttccttgctgacggattgatcttcaccaataccggcaacgcgccactatttcaagcctaaggtgaatcatggataggccatgccctccagcgtcactgctcgagctgtccgatctatccgactttggcatccgcctgaccccagcacctgaggtgtgggaatggctccaggcagagatcctcgccgacaccggcaccattcacaacgaagaccatgctcacctactggatgcagacatccgggttatgtgggcctcgtcgagcttcgagaagcagggccgcacagtactgggccaagccgagcaggtagcgttccgcgctggtggttggcagaaggcccggatggagcaacagatgcgcgattggttcggagatgtgccggccttcctcatcaccttggctgccgactactgcgcccagtgcagcgaccttgagttctgcgccctgattgaacacgagctgtatcacctggctcatgcgaccgacaagtacggtcaaccagcattcacccaagacggtgcaccgaagatcaagctgcagggccacgacgtggaagagttcgtcggtgtggtccgccgctacggtgcaagccctgacgttcaagcgttggtggatgctgcaaacagtcctgctgaggtggggaaattgaacattgcgagggcctgcggaacctgtctgctgagatcggcctgatttttgacaggctctagacggatgagaatttatggcagccctgaaaaatgaggtgaagagcttcatcgttcaggcgctggcgtgctttgacaccccctcccaggtggtggaagccgtcaagaacgaatacgggcttgtggtgagccgccagcaagtggagacgcacgacccaaccaagtctgcagggaaggggctggcggtgaagtgggtgaccctgttccacgacactcgcaagcgattccgcgaagagaccgcagagatacccatcgccaaccgcgcctaccggcttcgtggcctggggcgaatggctgagaaggccgagagcatgcgcaacctggcgctgaccgctcagttgtacgagcaggccgccaaagaggtgggcgacgtttacgtgaatcgccgcctcgaacctgagaaaccactgggctcccaagcggaccagcagcacgccgttgctgagtacaccttggagcctgatgagaatatccccgctaccccgtacctttgacccaccagtgaaactgacgcccaagcaggcgaacatttactgctggggcttccagcctgaggcccgcttccgcgatgcggtgtgtggccggcggttcggcaagacgttcctgggcaaggctgaaatgcgccgtgccgctcgccttgctgctgagtggggtgtgagtgttgaggacgagatctggtatggcgcgccgacgttcaaacaggccaagcgcgtgttctggcggcgcctgaagcaagctattcccgaggcatggcgtgcacaccgtccgaatgagacggagtgctcgatcacgctcaagtccggccacgtaatgcgcgtggtgggcctcgataactacgacaacttgcggggctccggcctgttcttcgtcctggtggatgagtgggcggactgcccgtgggctgcgtgggaagaagtcctgaggccgatgctctctacctgccagtacacgattccggatgtcggagtgcgaaagggcgggcatgcgttgcgaatcggcacgcccaagggcttcaaccactgctacgacacttatctggacggtaaaccaggcggcgagccggaccataagagctggcagtacacgtcattgcagggcggcaacgttcctcctgaagagcttgaagcggctcgcaggaaaatggacccgcgcactttccggcaagagtacgaagctggctttgagaactacgcgggcgtcgtctattacacgttcaatcgtgatgagtgccgaaccagcgaacgcatcaagccaggcgaagcgctgcatatcggcatggacttcaacgtcatgaaaatggcggctgtggtctatgtcgtgcgcaacgacctgccgatggccctggatgagtttcacggtgtgcgcgacacgccggagatgatcgagaagatccagacacggttccctgggcactcggtggcggtctatccagacgccagtgggcagaacaccagcagcaaaaacgcgagcgagtccgacttgtcgctgttgaagaaagcaaaattcacagtgatcgtcgactccacaaacccaggcgtaaaagaccgcgtgaactcggtaaacgccatgttcctgaatgcatacggcgagcgacgactgagggtcaacatcgaccagtgccctcagctcaccttgtgcctggagcgacagacctacaccgacaagggcgagccggacaaagatccgaaaaagggtcacgaccatatgaacgacgccgccggctacttcattgccaagcgctatccgatcaaagcgatcgtcacttctatcaaaatgggatacgcccgatgagcaacgacgtctccttcaagcgggctgaatacacggcagtgctggaccgctgggcgaccgttcgcgacgtctgcgcgggccagcaccgggttgtggatcggctgccgtacatcaacgcgcacgacaagtcgccggagaacgaagaccgcaaccgggcataccgcgagcgggcggtgttcaagaacgccaccgggcacacccgtaacgggctactgggtctggctttccacaaagatccgacactgacggtgccgaagaagcttgagtacctgcaggacaacgccaacgggtccggagtgagtatttaccagcactcccaagggactctggagaaagtgcttgaagctgggcgccacgggctttacgtcgactaccaccaagacgatggtatcggcgggcattcggtgatcttgtcctactgcgctgaagacatcatcaactggcgcaccggcatggtgaacggccatagcgtgctgacgctggtggtgctgcgcgagtcgccggagataccggatggttttggctacaagacagctgagcagtaccgggaactggcgctggaggatgacggtttcgtttgtcgtgtttggcgccggtccgggccgaaaggtggtgggccgctgactgtcatcgaagaattcaagccggaaggcgtcacggggcgcctcaaagagatcccgttcaccttcgtcggtgcacagaacaacgacccaagcatcgatgagtcgcctctgtatgacatagccatgatcaacctgggccattaccggaacagcgccgactacgaagacagcgtgttctggtgcggtcaggcccagccgtggatcagtgggctcgacgagtcctggcgcgactggatggagaagaacggcatctatgtcggctcccgagcccccatgatgctgcccgttggtggcgcattcggttacgcgcagccagcgcccaatacgctggttaaggaggccatgaccgacaagaaccagatgatgatcgagctgggcgcccggatggtggttgcgtcgcttgcgaccaagaccgcaaccgagtcccgtggcgatcaatcagcatctacatcggttcttgctggatgcgtagccaacgtcagcgaggcctacacgcgagccattatgtggtgctgcatgtacatgggtattgccgacaagaagatcgcctaccaggtcaatcaagagttcgtcgagctcactgccgatccgcagatgatcacggccttggttggcttgtggcagaacggcggcttcgcgaaagctgacctgcgggcgtacttgcgcaagctggggctaatcgcgccagagcggactgacgagcagatcgacggcgagctggaagagcaggccgatggcctgggcctggacgacgaggacaaagtagatggcggcgaaccaagcaatacttgacgcgaccatcaggcacgctgtctttctcgaaaagctaaaggctggggaggtgggcaagttcgcccccttcctcaaggagattgatcgctcgatccgtgaccggctcactcagtcggacctgaccgagtacaacgtcaaacgtcttgaagccctgctgaaggaagtagatagcctgctgctgggcatcttcgaccgctacagcgcgcaactgaacctcgacctggtggacatcgccaattacgaggccgagttcgaggcgaccagtcttgccaggtcggcaccggttggcgtgtcgctggatgtagtcgcgccgacagctgctgcaatccgtaccgccgtgctgacgaatccgctcagcgtgcgcggtaccggtggcggcaagctgttgaaagccttcataaagggctggactagcgccgagcgtgagcgtgtcaccgggaccattcggcagggcttcttcgaagggcagacgaacttccagatcatccgcaatattcgcggcaccaaggcggcagggtacaaagacggcatcttggccaccaccaaccgcaatgccagcacggtcgtgcacaccgccattcagcatgtgtcgtcccaggcgcgaatggaggtggctaaggccaacacggatatcgtggaagagatccagatggtggccacgctggacagcaagaccagccagcaatgccgctcaatggacaaacgtaagtttccagtggattccggcccaaggccgccgttccatccaaactgccgcaccaccttcatcctgctgaccaagctcagtgccatgttcgccaagggcgctacccgtgcctcagtaggcgccaatggcggccagcaggtaagtgcagacctcgattattaccactggctccagcagcagccggctgcgttccaggacgttgctatcggcccagtccgggcaaagctgttccgggagggcgggttgacggtggagcgcttcgccgaactgcaactggaccgcaacttctcgccgctaacactgaaacagatgaagggcttggagcctttggcgttcgagcgcgccggaatttaaccgaacatattcaatcagccggccttgagccggtttttttttgtccgtcgggcgggcaaaacatacccaaggggtgcatcaccgtggcagaagaaaacgaaatcgacctggaaaacccggcaatcaaggccgctatcgcgactgccgttgaagcatccgtttccggattgaaaaccaagaactcggagctactgggcaagctgaaggaaacctccggcaagctgactcagttcgaaacccagtttgaaggcatcgacatcgacgccgtcaaaggcctgctcagtcgggcgggccaggacgaagaaaccaagctgcttaccgagggcaaggtggacgaggtgttcaataagcgcaccgagcgcctgcgtggcgagcatgacaagcagttgaagacgctcgccggtcgcgctgaaaaggctgaagccttcgccgccaagttccagggcaaagtcctgggtgactcggtgcgcggcgcagcactgaaggctggcgcacttcctgaggcaaccgacgacatcatcctgcgtgccaaaggcgtgttctcactgaacgaagagggcgaagcggtcgctgttgacgagaatggccaaaccatccttggcaaagacggcaaaacccctctgactccgctcgaatgggccgagtctctgcgcgaaagcgcaccccacctgtggccaagggcttcagggacacaagccccgggcgggggtggcggccaggctgcatcgaagcgctccgaaatgacctccgagcagaagcgcgactttcagcgcaagcacggccaaaccgcatatctcgcattgcccaagtaaggggaaagacccatgcctacaactgtcaacaacgacctgattatctacaacgatgaggcgcaaaccgcctacctggagcgcatccaggataacttggacgtgttcaacgcctcgtccaacggcgcaatcgtcctcgataacgaactgatccaaggcgacttccgcaagcgtgctttctacaagctcggcggcggcctggagcatcgcgatgtcaactccgacggcaaggtcaccgctaagaaaatcggcgccggcgaagccgtaggcgtcaaggctccgtggaaatacggcccataccagactaccgaagaggcgttcaagcgccgcggtcgtgcggttgatgagttttcccagatcatcggcgccgacgtggctgacgccaccatcgaaggcttcatcgagtacgccaccggcgcgctcaaggctgccatcggctccaatgctgccatggtggtgtctgcgaacatcgaaaccgacggcaagaagactctgacccgtggcatgcgtaaattcggcgacaagtttggccgcattgcgctgtgggtcatgcattcgtctgcctatttcgacattgttgatgaagcgatcgcgaacaaggtctacgaagaagcgggcgtcgtgatctacggcggcctgcctggcaccctgggcaagccggtgctggtgaccgacaaggcgccagtggatgcgatcttcggcctgctgccgaatgccgtggtgatcaccgagtcccaggccccggggttccgttcttacgacgtgaacgacgaggaaaacctggctatcggttaccgcgccgagggcaccgtcaacatcgacgtgctgggttacagctggaaggaaaccactggcggtaccaacccgactctggccgccgtcggctctgctgcgaactgggtcaagcactcggacagcaacaaggtcaccgccggcgtgatgatcaatctcaccaccacgccaccagtcggcggctgataaccaccccaggaagcggccagcgatggccgctacggagattccgatggaactcgtttatacaaaccagcttgacggctttgagccaggcaagcgctaccgcgtcccaggtctgttccggagcgttgagcgcgatgcaaccgcagtgatcgtggtaggtgactatcccgagatcgtcacggcgtacgaagaagccggtgttgacgttgaggttgtcgagttgccggtgcctattgctttcggcacgcaggcgatcgcatctggcgaactgtccaagctgcttgctgatctgcaaggcgagagtgacgcaatggttctgctggtcgacggtctggaggctggcgaaatccatcgtccagaggctggcgcactggcattgcgcctgtttgaagtgctgggcaccatccacgcttcagttggagagctgaccactgagcgtgacggcctagccctgactgtcgacacactgcgcgaagagatcgaggcgctgaagaaggcctcgattacgccgcctgatgaggccggtgaaatcgcggcgctgaaagtaaagctcgatgaggccaaggtccagtaccgggccaacgcctcgaaagagtccctggaaaagctcgtcgccgagctgaccaaggagtaatactgctggctgtcggtcacccgacggccaattcacaaaccattccagcgagttaccgcatgacactcatcattgaggacggcaccggcaagcctgacgccgaaagctacgcaagcgctgaagaccttgcccggtatgccgtgaaattcggcacggtcatccccgcagacgtcccggagcaagaagcgctgttgcgacgggccgcactggcgatggatggcatgacctggaagggttgcaagaccagcagcgagcaggctttgtcctggccgcgccgagaagtgctgctggatcacgagatcaagccgaacaactaccttccggcgcggatccagtacgggcagatggccctggccgccgaaatccatcaggacgacattgacccggtggagaagcgtaagggcgcggtgctgctcgaacgtgttgagggggctgtgacccggcagtacgcggcgatccccaacaccagcaaccggctactgccagcggcaccggatcggcccagcgccactcagttcgctgactacttacagaagcgtggattgttttcggtgagggtctaaatcaaatattcaacatttgcaggtttttatagtggacaaaaacactgaataaatcttcgtcgctgctagcagatacgagctcagtaaaagtagaaaattcatttgagtggaacgggacatggtgttgagcatgctccgcgatcagatcgtcggtaaattcttctgcgcgcgttccagctaagacggtgcgtattgcctctttgaaatcctttctcgctgagcatttgtcgatgctagtgaagtctgccaatgcattgtttagacggttagcggcgtcgatcaaaaacaatgctttttcgccgttagtcatcgcaggtccttatagggtaactaaatggcattctacgaagaaatggccgtgatggctctggagatgatcacagagttcggccagcccgtaaccatcagcagaaccgagccgggcgagtacgacccggagacgggtggcgaagcgccaggtgcaaccgtcgagcaaatcgcccagggcattctgatcgacttcaccggccaagaattccagagcaacagcctcatccggcaaggcgacaagaagctcaagattgccgcgcagggattggcctgggtgccgggtctgctcgacaaggtcgtcgcgcagggccgcacctggtcaatcgtgccgccgctgaaagagatcaacccggccggcacgccgatcttgtatgagctgcaggtgcggtcgtgagccgcgcaggcgccggacaatccggcagcttcgccctgagcctggccgagttcgccgcgcagaccagcgaagccatcgacgccagcgtccgcgaaatcatcatcgaggtgggcagcagcctgattcgcatgtctccagtgggtaacccggagatctgggcgcagaacgctgtagcgaccgagtacaacaaggccgtcgacgatcacaacaccgcgcttcgaagcgatccgacaaacctcacgaagggcggcaggctgaagaaaggccgcaagctcaacgatggcatggatatcgtcgcgccggaaggatacgtcgggggtcggttccgtgcgaactggcacatctcgctcggcgtggtcgaaaacgtcaccttcgacgaggtagaccccagcggtgccgagacagtcgctgctctggtcgcggcaatgagtgacttcaccgccggccaaatggcctacatcatcaacaacttgccctattcgatcccgctagagttcggccattcgacccaggcccccggcggcatggtccgggtcaccgtggctcgcttccagcagatcgtgctggaagccatcaggaacaaccaggtatgagtcacgcaatcatcgcctctatctatgaggccaagctgatcgcctggaacgccgccaggtcggagaagcttaagatcgttttcgagaacacggcgtacacgccggcggcgggcgagacctgcctgcgagccttcactatcccgggcgacaccgcgagcaacacgctcggcggtgatcaccggctgttcaccggagtgttccaagtcagcatcatcacgccggcgggcgccggcaaagccaagacgaatccaatcgcagcagaacttatagatctgttcccgctatacgccagagacacgaagggctcggtcacggtggtgacgatgtcgccggtcgacccggggcccggcatcaccggcgattccacctacaccgtcccggtctcgttcttgtaccgggccgacaccaactgatcccgcccattgggcaaacccagagacccgccattgagcgggttttttcacatctgcaaagaggaaataacccatgggctacaaactaccgaacggcggcaccttccagcacgccgcaacctacgcgaccgcactggcgttcactgccatcagcaacgccgccgaggccgttgctactgtcgtcggcggcaccatcgctgccggcgatattgttctgctcacttccggctggagcaagctggatagcaaggtggtgcgcgtgaaggcagccacggcaacggcgattaccctggaaggcatcgacactaccgacacgcaggtctatccggtcgccggcggcgcgggaacgatgcgcaaggtgctgacctgggtgcagatcccgcaaatctccgacgtggccttctccggcggcgaacagaactacctggatgtggttttcctcgaggatgaccaaggcaagcagatccccaccgacaagtcggcagcaagcatggtgctgactatcgccgacgacccggcccaggccttcaacggggtgctgctgaaggcggacgctggcaagcagatcgaagcggcgcgactgaacctgcccggtaacgacaccctgctgtacggcacctacacgtcgttctccaaacagccggcggtgtcccgtaacaacctgctgacccgtaccgtaagtcttgcgttgcaggctgagccgacccgctacctgactgcggcggtgtaacccatggcaaagatcaggattgctcagaacgccacgttcaccgcacccgtgctgattccaatcgtcggcagcgcgcctcagaaggttgaattcacctttaagtaccgggatcgcgccgagcttgccgctctattcgatgagtggaacgagaagcggaagacggcgcaggcagcattgggggataagccgtcttggtcggaaattgtggccgtggataccgagcaacaaacccagcagatcaaggatctggtagtgggctggggcttcgatgacgaatacaacgaagacaacatcgtcgcgttcgtgaagtcctgccagggcgccgccgaggctgtcgttaaggcccatgagggcgcatacagccaggctcgcctgggaaactgatcgaggcggcgcgtgcgatgtactcgccgagcgcgcctgatgcgattatcggcatgttcggccttgcccctggcgacctggttgaagaagtggaggtctggccctgcaactggccagccttcctcctgtttaaccgaatgtccactcagtggcgagcaggcgctggcggcgcgattggtctcgactatagctgcatccgcgacgtggccggcttcctcggcatcaagaaaaagaaactcgctgaaatcttccctgaccttcaggtgctggaaggcgaagccctgcgcgttatggcggaggaaagggaaaacagcccgtaaccacgggcacttattcaaggtgagtcgatgaacattgcagagctcggcgtcaagatcgactcggccgatgcaatccaggctaaaacgagcctggatgagatggcgaaggccggcggccgtgccgagcagtccgccgtttcgctgatgaacgaaatgcagaccctggagaagtcgctatccaccagcgccaaaaccacacaggacctggcgaagcagcgtgacgcgctcgccaagctgaccaagaccggcgcctatggcgaggccgaggccgcgaagatctcggctcagctggataagcaacagatcgccctggccaagtctgcgatggacgagcagaaggcgctgaacagcctgctgggggcaattgatccggctcgtgctgcactggcaaagctggatacccagatcgagcaactagggaagcacctggacgaaggacggattagccaggaagagtacaactctgctctgggtaaaatgtacaaggattacgccaagctcgaaaagaccacaaccggcttcgacaagctgcgcctcggtacccgccaggcacaggaaaacgttgttcagctcggtaacgcgctgtcttcgggggactgggggagcggcgttcgcgccgtggctcagctgggggctggcgctggtgcaggggccgctggactccttgccatactggctccgcttgccctagccactgccgctgtgggcggcctggcgtacgcttatcacaaaggcagcgaagaacaggacagctacaacaagtcgctgatcctcactggaaactatgccggtatcagtgctggacaactgggcgacctggcgcgtcaggttagtgcgacagtcggtaccacaggccaggccgccgcggtcctcgctatgctggcggacaacggcaagatcgctggtgatagcttcgcgggcattaccctggccgctgtgtcgatgcaagaggctaccggcaaggctgtaagcgagacggtctccgagttcaccaaactggccgacgacccggtaaaagcatctgccgcgctcaatgagcagtatcactacctgaccgcttcggtttactcgcaaattgcagcgctggagcaacaaggcaaccacgccggcgccgtgaagctggcaactgagacttacgccgacgctatcaacgagcgtacgccgaaaattttggagaacttaagcttctgggagaagggatacaacgctgttgctcgcgctgctgacaacctcaagaacgtcggtcgaccggacattggtgcagacatagagcaggcccgccgcgacctggccgatgctcagaagggcaatatcggccttttccaaaaccagaaagagatgatcgaagttcggcaaaatcgcctgaacatgctggaggatgagaaggcggcccaggccgatatcgccaagtgggagggtgagcaggccaaggctcagggtgatgccgtatcgtcaatgacgaaaattgacgccttgaccaagtctgcgtggacaaatgagcaaaagcgcacggaggcgatcaaggagtacaagcggcaactcgaaaacatccgaaaggttgcgccgaacgacccgcgattgaaccaagcagcgatcgacaagaacctggcgaatatcaatgagcagttcaaggacccgagagcgcctggcactcaggtagatctgaccggcttcaatggcgcgaagaacaatctggcttctattgccgccgactacaaaaactaccagaaggaactggatgcggcgcaaaaggccgggctgatatctgaggctgactaccttctgcggcgccaagccctgatcggcaacgagcgtgaccaggtgacggcagcctacgaagccgaaatcagcgcgcttgagtccgccaagggcaagaagaccacctcagccgcgcaaagcattcagctggaccagaagatcgccgacgcacgcgcgggcattgtcaaggcgcagagagacgctgatagccagcttgaagtgctggcgaccaatgagacgggccgcctggccagacaagagcgcgcgatcagtacctacgtacaggcgcttgggcagcagcagcgagccttggagcttgccgggcagcgcgccgtacttggcgtggggcagggcgatcggcaaaacgcgctcagcggcgaactgaacagccagcaagaccgatttgctcagcggtcgctggagttggccaaccagaagtcggacccgtcgcggaacatgtcggaggaagagttcatccgcaaatcgcaagcgctcgcagacgcgaacaaggcggctactgaccaaatccggcagaactacgcggatgtagagaacgcccagggcgactggacgaagggggcgacagctgcctgggataactaccttgactcggcgcgcaacatagccggccagacgaagagcctgttcggtaatgccttcagctcaatggaagactcactggttaacttcgccctatcaggcaaagcatcgttcgctgactttaccaagtcgatcctggccgacatggcgcgcattgctacccgccaagccagctcggcgttgctgggcagtctggtgggggcggctgcaagctacttcggtggcagtgcggccggcggcgggaatggcctggcggctgggtccgcaggtgctacgtcgtcgaacctcggcgcatcgcaggcaggctactccggcacctatttccaggccgacggtggagcctgggccaacggtgtgcagatgttcgccgacggcggcgccttcactaattccatcgtcagtaagcccacggcgttcggtatggccaacggcaagaccggggtcatgggagaggcgggggaagaggccattatgccgctggccaggacttccagcgggaagctcggggttgttgccatgggcggcggaggcggcggtgtaaatctgagtctcagcatgccgatcatcttaagcgatcaggaagccggtcggcctgatggtgctgagttcgacgccgagaccttccagcgcaacatggaggcgcgcacccggcaggttgcagtcgaagaaattgccaaatcttggcgacagggtggtgtaagccgccgcaacgtaaagggatgactcatggcaatcgaacgtttcacctgggcaacggagaagggcgcggagggcgatatagcccagcgcgtccgctccaagaagttcggcgacggttacgagcagtcagtcgaggatgggatcaacaaccggacgcaatcctggccggtgaccttcactggcttgaagccgcgcatcaaagacatcatggcgttcctggatcggcacaaaggggcccggggtttcctatgggagccgcccctgggcgagcttggcctctacaagtgcaacggctacaagccagtgcatcgcgggggacaggtctacgccatcaccgtcaccttcgaacaaacctttcatccctgagacctacccatggcactgatcacggacatccagaagctggagcccggcggcgaaattcgcctgttcgaaattgacgggaccgagtacggcgcggattacctgcgctttcacggccacgccatccctcacacgcccgatgaactgctggcctatgaaggctctgaagcggatttgccggccaagtcgatttggtggcagggcgccgagtacgcggcctggccggcgcagatagaaggcataagctccagcagcgacggcacggcctctcgaccgacattcgccgccggcaatatcaatggccgattgactgccctgtgcctggccttcgaggacctgctgaagttcaagctgacggtgcgcgagactctggcgcagtacctggatgcggcgaacttccccgacggtaacccaactgcagatccgactcaggaggctctggagatctggtacatcgaccagaaaaccagcgaagacggcgaggcagtagtctgggagctttcgtcgccgggcgagatcgacaaccatggcctgcctggccggcagatgaccacgttctgccactgggccatgaccaatggttaccgggggcccgattgcgggtacaccggcgcggccatgttcgacgacgaggacaatcccacagatgacccggcacttgaccagtgcaagggctgcctgtcgtcctgcaagttgcgctttggcgagagcaacgagctcagttttggtggattccccgccgtcagcttgatcgccaggagttgagcatgcgcaagcacatcatcgcagccatccaggcgcacgctgccaccgagtacccgaaagagtgctgcggcctgctactggcagtcgggcgcgcacagaagtacttcccgtgccggaacatcgccacggagccgaacgaagagttcaggcttgatccagaggactatgccgcggcggaagactttggagaggtgatcggcatcgttcattcacacccggacgccaccagccggccgtcaccgcatgacttggccatgtgcgaggccacggcgctgccttggcatattctgagttggcccgagggcgacctgcgaacgatcaccccgacgggcagcacgccgctgctcaagcgtccgttcgtgcacggcgcatgggactgctggcaggtctgcgctgactggtatcagcgtgagtgggcccttgagttcgaagcgttccagcgcgccgatggttggtgggagagtgcggagaacgcgagcctgtacgagcaacactacgaggcggcggggtttgtacgcgtcgaccgcccacggcgcggcgacatgatcgttatgcaggttggccggacagttcacccgaatcatgctggcatttaccttggcgccgatccgtcgctaccaagtgaagaatcgggcgcattcggccctggcccgttcctgttgcaccacctgtacggcaggccgtccgagatcatcgtctacggtgggccttggcatgaccggacacgtctgatcctcagacacaaagaccggcacgaatcatttgatatgaagggggcgcttcagcaagttaatggagggtgagcagcagtgggttctcttcttcaaagatgttttgctcaggcatatttcttgagaaaaaaccctcaaataccacctggaatctctcccgacagtcgtatagctgtgctctcttgaggttacgtatcttgtagccgtcattccgatcgaagtggcagccaaatgaaaggaaacagtggctgaagatgcgaaacacctgccagtagagctgagggtcgatttcctcttccttggccaattggtagagagcccactctaagagccagtattcatcttgtgcccagagcgcgtgctcgtgtagctggccattgaatgagttttcgtcgtagtcatcgcaccgcgggaagtttctttgaactacaaatcgagggtccatcacgaggttccttatgtctgcgtggcagacagttctttatccacgacgataatctaagctcggagggccacatgcaaatcatacaccgctacatgctgaccattcatgacctcttcaccttcaccggtggcggtatctgcggcgctgaagccgaagtcgccattcttgatggcggtgtcgagatggatcgcgtgaaattttccggcaagtgccagagcaaaggcggctacagccgcagctaccatggcaagtcagggcttcaggctgcgcttgtatctggtccgggtagaattgattttggcttggcgcaggcagtcgctatctaggctcttcgccgccacccataaactcatcggttcctagcctgtgcgacccatacttcacagtgtggccatcacctagatgctcagcctcgatctctgcgacattcttgtcggcgtagatgtcaacaaaggtccatggatcattacgacccactgcccaccccagcacccatccaggcatatccggatctgctggtagatttttcacgagacttctgactgacatggccattccttggtaattgaaggcgcaacgctactacggcaatcgtcaggcgagttactggcattccatccatgctggatgcctagctaggagatagcatatagcgcgtcagctttcgacccaaagtggtcaatgagttacccgcgatagcagcaccgaatggctatccagtggcagggtgaaggcagtttctnnnnnnnnnnnnnnnnnnnnnnnnnnnnnnnnnnnnnnnnagtacagagagttcaaagaatctaaagctatcgagctcgctgcaaagctgacagatcgtactgttgaaactatgaagggggttcatgaggaggctaaagtcgaccctgataaccttttgcatggaaatgagtatgttgtagcgactgagtttttgatggatgctgtgcttggggaagttaagtccttaggcgtgaaggcggggagcacggtttttgctaatggtgcaaaaggcattaataagatttttgaacccggtcgaacgccaaaagctagcgagttgaagcaatatgcggaagctcaaggttggaagcctgtacagactggtggtggcactctcaaatatcttgacgcgaatggcattcctcgtgtgacaatcaaacaaggcagttcgcgggcgccaggaagtgctgatccacatgttgagtttaaaagcgcgacaggtcaaagaacagacgcctttggtaatccggtaacaagaaaaagtccggataatcacacgtcaattgactttgatttgtgaggataaatatgaactattatgaaattccctcgctttcaaatatctatctcgaagatagctatgttttatctgttcgtgaggcggaggactctctaatctttgagttagaagcagttcttactgaaagtcatccaaaatataaaaagccacaagaaggagagaaacattgctatagaaagatttttttgcgctttctaaatgtagattctttcgaatggcttgataggaggtttatggcatatgcagatgcttcgggcgagttcgattatgggaatatagacagttttgttggttgtgatgatggctatgaactgaccggagactgggggcgagtagctatcaaggggcaagctgtagatataattgtcgaagattagttggtgcaaaaggggctggagacactctggctacgctgagtcaaggccaaaaaagagttgtcggaaaaattgacaatattctcatgatttcaaggatagtgatattacgggtaccttaaaggatatggctggtaatcctgttccgaagcctggcggtggttatcgggatcacctaaaagagatgaacgacactcttcgaggtttacggaaccatgcggacaccttgaaggggtgaatgaaccgtcagcgcaagctgcacgtcagcgagcggtcgatactatcaatcgtattgagtcagctttaaatggtgccgggatatgacgtttcgtgaattggaaagacttactcaaatcagttggttaccagaagacagcccgtcgtcgttgagcgaatggtatcttttggtatgcgatactccactagatcacttaagtgtaggagatgtatgtcgcgcaattaggcaaaatctttttgttaatgagctattaccctttgctgtgatattactacatgatgatgtgttggcaggagagagatacgacggcgagctgcttgcagctctggcgagtgtgagtgcagagtgttggcagagaaatacaagtgcggcgcaaaaggccgtttgcgctttggccgaagtgaagaatttaagccaagatcccaaactattaaaggatgcttcgactttgttgagggcgcttggcgtttaagtagtttgtaagttggtgcaaaaggagtgtcggggtccgctctgacgagggacgagttgatttcgggattgcctgtaggcactaaaatcaccccaggaagtgtggttgatatccgtaggttgccagatggccgaacagtctggctggaaaagggtactgatgctgccggattgcaacatatctacaaacgacacgaagccgactttgtcaacaaaggcatctcacgtgatgacattccaaatgttgtaatgagtgctcttgagcgtgggaaagttgtcgggaccaatggttcggctaatgtttatcgcatcacgcacaatggtgttgagcaaaataccgcagttggggttagctcaaacggcttcgtggttcgagctaatccggtcagttcttggaaaccattgccatgatcaggttaagactaacgagtgagtatttggctgggccgatattctgcccagatccggatagaatggggcacgttgatattgaagatttacccctttgtccagagctgatggtcaaaatcagtgagtgggacggtgagtatcagtcgacgttcaacaacgactacccgcccgattcttgttttgccacgcctgaggcagagcttcggcataaagcagagggagaggaactggccaaatcgatgcagcaagaactagggagcagttatatggttgagtattgcccatagtcgataattagtcggtacaaaagatggaaatgcgggtgagttcagtggcggtaaaccagctgtggtggatgatccatatagcccaagcgctgttactgaaaggtctaaagtaagtcgagatagctatggaagggaaactcggccgatgaattttcagctggccttcttaactatgcaactcattcaacagcaaagagctatcagtctactgtgccgcgagatttgaatgagcaaacgttgtggaatagagtgattgataatccctcggctggtcgtgatacgaaattagcaggcgacaaagattttccgcgaagtgaaggatggaaaaaaatggaagccagtcagcggctgcttaacggagaaaatataaccgtttactatcagtacaactccgttaccgataaagcatatgatatgaaaatcacgacgccccagcagctgccgcctgtgctgcagcccggaagaactattgagtgatgtggacatgattgttcgagaaattggccgagaagagcctgtgcaggtttttgggatttactggataaggaacgagcgcttttactgggtcattccctatgatggttacggtgggttgatggcactcagtgaaagtgaggtcaatgttcttgactcctctttgtcaagtgatctcattctctgcaaagatcgagatgaaggagacatgattttgcactgggcagcagaagatttaattgaagagctagtggagcgggatccactagctatggctgagttcttagagcgcataaaaaatcatagtgcaaaccattgacaagcggatagattcgcaaaaaagggggcagatttgaatggcacttactcaacagctaaccggctgatctgattagaaaaaaagaaaaaaggccgcccttggtctacggtgatagttgcgaacacacaccgctagaacaaggagagcccgcgtgaatcggagacatcaaatcgtcaggcatcaacagcagcgcattcagcagcacgccaaagatagcaatgcccatgcgttctttcaaaaaacgggacagatttatttatagggttgacgagcccttttagatatagcgaatgagtctctggaaaatatatctgtcccttttttctttttctttttcttttacctcaggtaggtgccgtcctacgtgaatggtggtggcaatttggtcagggttggggtattaatgccgaaatttttgaaggatcaaaactatgcgtatttggattggctcactgatgctgctcacctccgctgtagcgctgggtgatgaggcacagctgaagcagtgggaaaagatggatcgctgctctaatgcagcctttatcgtggtaaaaatcttggaagaaagtgcagacacgtccaaacaagcactggccctacacggagccgtagaagggctaaaaaccaacacaaaattgaaagaagcgacaccgactggaaacgaagtcattggcgcctataactttgcgcttcggatctcttatgagatgcctcgacccttcgcaaagcgtgagcatgattggctcattgctcaggcagcgactgcatgcactttatgggttccaagtgttggcgctcagtaatcaaagccagtggatggccggcgttcatttatcgatcgagcaactgacctgatcatgccgctacttcgtatttacggccgttccagtcccggcggtgccctccgctaacggatgcagcatggcgggcaatagagggttgagctaggatttctacttttttcaaggacgaggcgcaatgaacaagctcaaggcgatgaatgcggcggtagagcgctttttcagccgattttctcgtaaacagttcttcgtggcgttcgccgtcatcactgcggtcaactactggctggcctataacgtcgcaggctacaagtcggtctatctggccatggtcggaggttttttcttcggcctgatgtttgcgaaattcgagccaaataagtaatcgccaattacgcttttcagcctgacggattcactcatttttaccgtagtctagcggcgtaataaccacaatgaggttcagtaaacagccccgcttgcgcgcggggcgtcaccactcttcacttaccgagtttcttgcgtacgtcgtcagccatcggaccaacagctctcactgcatccttgagctgttgctcggttacaccgaactctttggtccagtacttcacctcccaagcttccgaggtgtttactcgagcgcgatcttgcgggccacggtttttcaaatcgtcagacatatttagctccatgcgggatgacttggaagcgcccaagcctatctcgatagaacgttagtacaagacggtagttcggtctgaataaagaggtggggaattcgttcggcaggacgccaggcgagggaattgcggaacagaaaagataagggcctgcccaggtttccccggcaagcccttgatatctatggtgcccgaacccggaatcgaaccgggacgcccttacgagcgggggattttaagtcccatgcgtctaccagtttcgccattcgggcggtagcgcggtgtaacagggttgggaatatatagatctagccgcttcagcgcaacctccaggccggttttcccgcataaagatgcgcaggaaaaagcttggcagatcagtgatctacagggcctttgtgccaagtgctgatgaacgcaagcaacccaggaacaagccccataaatgacagtcatagcgatatgccatttcggcatttcgccaggagtcgtttgatgctcagtgtccgtaagcaggcttggatcatggccgtgggtgtggcgggtttgttgggcactgccgtgttcagctcggcgcaggcggggagtgcggtgcagtggggtgagtttagtgcgtcgtcttcagataagttaacggccggctcgatggacgtgggcggtgtctatgtgttgaagccgtcgggtgtttccgtgggggatgtcgaggcgctgcaggctgggcaaaaacagagtcaaagcgaactgcaaagcttgaaaagtaaggtggaagggcaggagcgtgcgtttgatgagttcaagcgcaaggacggttcgagtaccagtagcagtgacagccagctgtcgagtctcaagcgtacggtggatgagcagaagagcacgatagagcggcagaaaagcgagatcgacgggctcaagcgcagcctggatgatgtgaagcgcagtgtggagaccttgagcagcaaggtgaagtgacggcactgatgctgtgagcaatatagggcaactgtgggagctggcttgcctgcgatagcgatgtgtcagtaccggtatagaacctgttacaccgccatcgcaggcaagccagctcccacattgaccgtgtcggccttcagtcaatcagcgccagcaagtcggtgacccctacgtccacacccgcctggctcagcagtgtcgtcacctggccgcggtggtgagtctggtggttgaaaaagtgcaccagcaaaccgaagaagggtttctcggcggccacgccgcgcatgttgtgatagcgcaggcgttggtcgaggtggggctcttgcaggctgtgggcccaatcgatgatgagttgatccagccaggcgcgatgggccgctagttcggaaaggctggggaaggctacttgctcgaggtcgctgggcgtggccaccccgttcagcggcgccaaggccgcaaagttggccgggtgttcggcaaagcgcttgagccagacggtgtcacccagcatcaggtggttcaaggtgccgaggatcgagccgaaaaacgcctggcggtcctgggtcaattgtgcgtgcgtcagggtgctggcggcgtcgtagaccttgcggttcatccattggttgtaagtggccatcaacgcaatatgctcgatgcggttcaccgctgttctcccttgtcggcgtgatggcgtcatcataaagcttgcccgcccgacggtcatggtgttccatcaggggaggactatgtttgatcaacgccactattgcgccccggagggcgacaccatgaataccagcgatctactggaacaactgttgcgtgcagggcagcaaggcggcggggcttcgggcggcggcctgggcgggttgctcggagggttgttgaagggcgccggcaccggcaatgcgtcatcggcgggcggcggtttgggtggtttgttaggtggcctgggtggcttgttgggtggcgcgccggcaggtgggaccacccagacgcgtagcggcggtgggatgaactacgcggcgctggcgtccctgggcatggcggcgttccaggcgtaccaagcctggcaacgccaacaggcttcggcaccgcagcaagctatccagaccgttgaccagcttgacgggcctgaagccgaagcccatagccacggcgtactgcgtgcgttgatcgcggcggccaaggccgatggcgaaatcgatgcacaagagcagcagatgatttccgccgagatcggccgtcataccgacgacccacaattgcagcagtggctcgacgccgaagttgccaagcccctggatgccgccgattttgccgagtatgccaatgacccggcaatcgcagcggagatttatctggcgagcgtgatgctggtcgatgaccaacaggacgccgagcgtaattacctcgacgacctggccggtcagttgcaaatcgatccgcaattgcaggtgcatctggagcagcaggccaaagcctagaacctcagcgtcgccccagtggtcagccactgggcgcgatcgccaatcaggctgcgcccgaccagcacgtccacgtcgacaaattcgccgatgtgcaaacgcggcccagcctgccaggcctgttcgccgccttcctggccatagcgctcgccaatcaatgtgagcgcgtctgccaactgatattcgaaccccgtgccccacgtcaggcgatgctgttgatcaccctcgttgtaggcgtggctccagccggcgttcaggttcagccgcaggggcgccaggggttgccatgtgagtgggatgttcaggtctgcgccatcaaacccgtgatggcgatccagcgcgacatgcgccccgacagcaaccgccagttccaagcccaagtcttgccgtgacagcacctgcaccttggcttgcgggctgatctgcgtctcgcctttgcctgcatccgtggcccgtgacaacgcggcgccccattgcacggcaggcatggcgctgaacgtgcaggcgggcgacacgttgctgttgtgggtactccccgcgtgccgctgggcgctgtaccaggcgtcgacgttgcattcccccggcgcgttgatcgcgccgtcatcaaccacataagcgccgcctgcggcttgggcttttgaaatcaacgcgacgacaaagaccaggcccagcgtcatgccgataaagatcaagttgcgctgcaatgcacggcgcttggccggtggcagtaacagcaaagttgggcgagcaccgcgagagtggcgtgcgcgatatttggcaaacccgtcgcggcgtgccggcgtgtgttttttgtgcatgatgcacctcgcttgaattcagctttctacggtcagcaccgaaatgccgctggctttggcctggcaaaccagctccgaggtatcgtcaccgcccggcagggcgatgatcaggtcggggcggctgtcggccagcatgaagtggttgcgctggcgttcggcctgtttgccgtggcgctgccaattgggtgggtagcgcaccacgtcgataccgatttcccgtgcccattcctcgatctcgctgccgagaaactggttgccgccgtggatcaatacctgcaccgggtgcaggcggtggtaagcgtccagcacgtggcgggactttttggtgtcggcgtaatgacgacctgcacagatcaacacgcgcatgagcaaatccttgtattgcacgctggcgaccgggcggccaccagcgttggaacggcggggagggtcagtaccactgcttgaagcggcggatgtagatggtcttcatcagttgggcgacgcagcagtaagccagcaacgtgcctaccagccatgggaagtacgccatcggcagcggttgcaggcccaccagggtgcccagcggcgagaacggcacgtagatgcccaaggcaatcacgatgcaggtcatcatcaacaccggccaggcggctgtgctctggaagaacgggatcttgcgggtgcgcagcatatgcaccaccagggtttgcgaaagcagcccctcgataaaccagccggactggaacagggtctgcatttccacactgttggccgagaacacgtaccacatcagcgcaaaggtggtgatgtcgaagatcgacgaggtagggccgatccagatcatgaagcggccgatgtttttcgcatcccacttgcgtggcttggccaggtattccttgtccatcttgtcccacggcagggccagttgggagatgtcatacatcaggttctgcagcagcagatggatcgccagcatcggcatgaacggaatgaacgcgctggccaccagcaccgagaatacgttgccgaagttggagctggcggtcatgttcaggtacttcatgatattgccgaaggtttcgcggcccttgagcacgccctcttcgagcaccatcaggctcttttccaacaggatgatgtccgccgattccttggcgatgtcggtaccgctgtccaccgaaatgcccacatcggcatcgcgcagcgccggtgcatcgttgataccgtcgccgaggaagccgacggtgtgcccgttagcttgcagggccttgagcacgcgggatttttgcagcggcgtgagcttggcgaacaccgtgcgttcttccacacggcgcagcaaagtggcgtcgtccatggcttcgatttccacgcctagcagcggctggccgggttccagtccaacctggcggcagatcttgctggtgaccacggcgttgtcaccggtcaacactttgatcgccacgccaatctgttgcagcgccgcaatggctgggcctgcggtttccttcggtgggtccaggaaggtcaggaagccctggatcaccaggttgcgttcgtcgctggtggtgtactgctggcgtgccagtgctttggggatattgcgggtcgccactacgagtacgcggaaaccgtcttcgttgtagtcattggcgagtgtcagcagggcgtcacgacggcgctcatccaggggcaaggcttcgccggcctccatgacgtgcgtggcaatgctcagcatctcttccaccgcgcctttgcacaccagcagatggtcaccggcggcatccttgaccacgatcgacaggcgacgacgaacaaagtcgaacggcaattcatcgaccttgctgtaggcaaacggcacctggaacttggggttctgttccgagaactgcaccaccgcctggtccatcaggtttttcatgccgctctggtgaaagctgttgagccaggccagggacagcacggcgtcatcgcgctggccgaaggcattgacgtgatgctcgaggatgatcttgtcctgggtgagggtgccggtcttgtcggtgcacagcacgtccatcgaaccgaagttctggatcgcattgaggcgcttgaccaccaccttgcgcttggccatggccgtagcacccttggccaggttggcgctgacgatcatcggcagcatttccggggtaaggccgacggctactgccagggcaaacaggaaggcatcgccccaatcgcccttggagaagccattgaggaagaacacgatgggcaccatcaccagcatgaagcggatcagcagccagctgacactgttcacgccgcggtcgaaggcggtttgcacccgcgagccgacaatcgccttggccagggaaccaaagtaagtgcgcggccccgttgccactaccaccgctttggcgcggccgctgaccacgttggtgcccatgaagcagatgttcggcaggtccagcaggttgccctggtcggcggcgagggtggaggcggatttttgcgtgacatcgcccagggtgtcgtacttctccaccggcaaggcttcaccggtcagcacggcctggctgataaacaggtcacgggattcgatcaggcggatgtcggcagggatcatgtcgccggcagacaactgcacgatatcgccggccaccaggtcgcgcatcggcacttcgcgcaaggtgggctgggcgccaacctgctcgcggcgcagcacggtggcggtggtgcgcaccatagccttgagggcctcggcggatttggccgaacggtgttcctgccagaaacgcagcaggctgctgagcaacaccatggtcatgataatgacgaccttggtcgggtcagcctcttcgccttcctgcatcggtagccagcagtcagtcacaaagctgatgccgcccagggtcaacagcacgtagatgaacgggttgttcagggcctgcaggaactggatgatcgcgtgtggcggcttgtcatgggcgacttcgttatagccttcccgttgcaggcgcgccgaggcgtccagttcggtcaggccgtcctgggtggcccgtacattggcgagggtggctgctaggccattgtgggcttcacgggcggcacgcatcgacagcttggtgtcggtggcggtgccattttttttgtgcagaggcgtgttttttacggcgctcattgtctgtactcctgtcgccaattctcgacaaaacatacccggtacttacctgtagacaggcgagcgaaagcatgccgagtcgcggacttcgcgatcggtttagataaagtgttcacgtaacttctgaagggcccgctaacagtgcgttaattaactaacgtgcagcgggctactactggacttgttcataaagaactccaggggtatcaataagaaagttgtagtttgcagccaggtcaggcggcgcgagcgctcaggtaaagaccgaacagcaagcgggcttgcgccaggctggaaacctggggtctctgtgggtcttgagggtcggcgtgatcccagtgctgcaccaggtggccgctttcagggcagatacgccagtgggccagcggcggtgccggacgcacttgaggggagggtatggcaaaggtcgagcgggttgacgaaaagcccacgggctcgcggcacagcttggcgcgcagggcggcgaccagtgtgcgtgtatcgggcaaaacaaggagttggaaggtcataacacacctcgggaccggacgggcgaccggtgaggcagttacggtggagcatcaagctctagcgcagcttaccggacctggaacgcgagtcctgtcatattctgggtttggcgcccgacgcccgcagaggcggtgctcggacagcgactagatactgtgtccattggcttcttttgtgaggtttaaaaaaggccccagttgcgggcacgggcaatctactcagggcgtcagtgaatgtcaacgtatgattaattaaattatccggtgttcagagttcgttcagataagaggcgcgcgtaagttgtaggttgaataacttcatataccttgcgcggcgaggagtgccagatagatcaatactaaaccgcaggccgcataactcacgcgttgccaagtcggtgatgcgtttttgcgcagcaggtttaccaaggcggcagtgagaaaacacgagagcaccgacgccagcatgaagccggcaaaaaacatcagcgtttgcccgtggctgggggtggtgccgacaatccccgacagggcgctgcccagggcgccccagtagacgatgttcttcgggttggccagggaaatcgccgcgcccaccgccaacgcatttttgcctgagctggcaggggcgttgccggttgcgggtagctgccaggcatcgatcaggctgcggatgcccaaccaagccaggtacagcgcgcagatgattgtgagtggtacccgcactgcatcatgctggatcagcagtgcgataccggtgaggccaatcacggcccagacggcgtcgcccagcagcgagccgaactgcaccagcagggccggtgtgaagccatggagcaagccgcggcgcagggtctctgccagtacggcgccgggggaaaggcaaaatacgaagccgaataccagcgcataaacaaagatcgacagcatgctcagttcctttcgagaaagtgccagagcatacgtcagtccgggaaggggataccacgtcctctgtaggaacgttcgcgatggcggtatgtcagccactcaatcttcaactgaaccaccgccttcgcaggcaagccagctcccacactagccatgcattgcccacagaatcagcgtctgtcacaggtccctgtaggagcgagctcgcgagaagcgtcaacgataacgcgcgtttcctgaatgaacgcggtgcttatgagtttttcgcgagcaagctcgctcctacaaaggctgcggtgttgaggcaatgcggtcgatttcagccttcaattcatccgacgataaactcgcaaacggcagtgcaaaaaacgccttgcagcgtgcagcgataatgtcgagggtggccgtgaatgccgcctctacctgcgcctcgttaccctgcacctcggaagggtcttccaagccccaatgcgtcttcaccgctgggccgaaatacaccgggcacgcttcaccggccgctttatcgcatacggtgatgactacatccggcgggctgtcttcaaaggcgtcattgcctttgctgtacaggccgtcagtgctgatgcccgccgcctgcaacgtggtcagactgcgtggcagcacctgccccttggggaagctgccagagctgatcgcctcgaagcccgacggtgccaggtggttgaacatcgcctcggacaagatgctgcggcagctgttggcggtacacatgaacaggactttcatggggcgttcctttagaggctcaggcgcaaggcgagggcggcgagggtgatcagcagcacgggcaaggtcagcacgatcccgaccttgaagtagtaaccccaggtgatggtgatgcctttgcgcgccaggatgtgcagccacagcaaggtggccaggctgccgataggcgtgattttcgggcccaggtcgctgccgatcacattggcgtagatcatcgcgtccttgaccacgcccacggcatggctggactcgatggacaacgcgccaatcagtaccgtcggcaggttgttcatggccgaggagagcagcgccgtcagtaccccggtgcccatggccgcgccccacacgccgtaggtggcgaaggagtcgagccaggtggccaggtagtcggtcaggccggcgttgcgcaggccatacaccaccaggtacatgcccagggaaaaaatcacgatctgccaaggcgcttccttgaggactttgcgcgttgaaatcttatggcccttggcggcaatcaccagcagcagcacggcgcagacggcggaaatcgcactgatgggaatacccagaggttccagggcgaaacagccgatgagcagaatacccagtacccaccaaccagcgcggaacgtcgcagggtcatggatggcactgctggggtcttccaggtcagccgggtcgtaggtttggggaatgtcccggcgaaaaaaccacagcagcactgccagggtcgcagccacgctgaccaggttcaccggcaccatcacggcagcatattcgttgaagccgatcttgaaatagtccgccgaaacgatattcaccaggttcgacaccaccaatggcaggctcgccgtatcggcgataaacccggcgcccatgacgaaggccagggtcgccgtcggcgaaaatcgcaaggccaacagcatcgacatcacgataggcgtcaggatcaacgccgcaccgtcattggcaaacagcgccgataccagcgcacccagcagcaccatataagcaaacaaccgccgcccgcgaccacggccccaacgcgccacatgcagggctgtccaggcgaagaagcctgcctcgtccagcaacaagctgatgatgatcaacgcgacaaaggtaccggtggcgttccagatgatgtgccacaccaccggaatgtccgccaggctgatcactccgcaggccagcgcgaggatggcgcccaacgtggcactccagccgacgcccaggcccttgggttgccagatgaccagcacgatggtgacgaggaaaatcgcaattgcgacaagcatgaataaaagctccgatggctcagcagcaggtgctggcccgttgtggtcggtcgcccattgcattcagacgcagtgcgtcgtcctgcaaccatggctggttggcttgcagagtgatgtccagcacctgagtgacccaagcgggcagtgccggattgatgcggtagtagatccattgcccttgacgacggtccaccagcaggccgcaactgcgcaattgcgcgagatggcgggagatttttggctggctgtcgtccaaggcatggatcaactcacacacacaaagttcgccctcgcgcaggatcagtaaggtcacccgtgcacgggtgccatcggccaggcatttgaacagggcggtcgggatgaggaggtctgacatgatcaaggacttttcaagtaggtacattcgaatatacgtatttccatatatatcggtcaaatcttgtttcaattgatatggatcaaatgcctttgaaaccgccacaactgtttgaaattaaaatgaaacacaaatgtcctaacgtgcctgcccattgctgatgaaggaagaccccgcgtgacccgagccacccgcaacctgcgcaagaccttggattccgtcgcggaaaataacgaaaccgcggcgtttgacctgatgcgcgccgtggaaaaactcggcgatgaagtgctgcgccaacgcctgctcaataccatccaccgactgaaccaggatgcctacgaattgcgcgaggcccgggattcggtggagcaggtgtcggtcaagctcgcctgagcaagatcgttcaagacacgccctcgttcgtgctggcatgcttgtcgactgtctgtcgatgagccgtttccatgtccactgcattacctcattacgccttcacccgcggcgccatcgccgtcattcccttgtccctggcctgcgcaccctggggtttgctggccggctcgatggctatcgacgcgcaatttaccccgctgcaagcccaaggcttgtctgccattgtgtttgccggcgccgcacaactggtcgccattggcatggtcaagagcggtgccagcctgatttccattgtgttgaccaccttgctgctgacctcccagcatctgctttatggcatgcacatgcgtcctaccctttcttcgctcaacacccgctggcgcatgagcctggggtttttgttgaccgatgagttcttcgccctggtcaaccactatgaccgccagaccttcaatcgctggtatgccctgggcgtcggcctgacgttttatatcatctggaacctcttcacccttgccggcattgtgctgggcaagagcattcccggccttgatcaattggggctggagttctcgattgccgccacctttatcgccttgatcacccccgtggtgcgcgatgtacccacggtggtatgcgtggcggtggcactgctgtgctcagtctggctgagttatttgcactgggaatcggcggtggtggtctctggtgtgttggggatgagcgcggggtttgcctgcaagcggctgggagtggggcaacgatgatttacctgatgattgtggccatgggcttggtggtgttcttcaaccgttacctgtttatcgagccacgcttgccggtacggctcaatcgcggcgcgcgtgaattcttgggcttcgccgtgccgggcatgctcacggcgatctgcgggccgattattttcctggcggaccatcagctcaacctgagcccgaccaacccttacctgctggccggtatctgcgccgtggcgttgatgtactggacacgcagcgtattgaccaccgtgttattgagcatggcgctgttctatctgctgcgttggtggctctgatacccgggcaaaaaaaagcccgcggggtggcgggcagaagggagacttctaaaaaatgagcctggccactataggcggcgtgttggctcttcacagtgaaacaaagttcatgggcgcgtcagttggcctcggcacagtggtagagtcacggtttttccaaggaagcaatggcatgcacaaagtggtaatgggcgtattgataatggcggcactggccggttgcgcaggttcgaagatgaaagaggcgcgcgcaggcagcccctacaagaccctggcgtcagacaaggccaccctggtcgttgcccagtgcatccagttcggctggcaggatgaaagcgtgttcggcgtcgatgccggcggcttcaaggaagcgaccgaggcgggtggtttcacggtgtacaccaccggtggcgattactttgtcgatgtactcagcaccggcgcgggttctacggtcaactattatgctgctcaggacaatatgccggccaaacgtcgcctggcagcactggccacttgtctgtaagtcggttgccttagtcatattccgaaacgcctggcgggacagccgccgggcattggcttatgattcactcgctcgttcgacgtgatggctctttaccggtacacggatgtcgaggcttaaacgtcgaacgagctcctccaccccacctcaacggggcatgaaacccaagtgccagcgtcgcggaatcaacagtgtcgccacccccaaggccccagccaacgcaccactgacccacaatgcgcgcaggcccatctgctgttccagcagcgcaccgatcacagcgccaatgaacatcccaccccacggaatcaattgcacgcgccagccattgcggcgctcgcccaataaccagcggcccagcccgcgaccaaaacgtgacagcgccccagtgacgtaggtcagccccaccggcagcccgttcacctcttcgacggccgcgttgagcatgcccatggcaatgatcgccgcgagcaacgcgggcaaggtgtcggtggcaggccacaacgccgcagcgcagagcaaggcgccgatgcacagcagtaagggcaacgcatggcgcttgctgaaacggctgaccagcacacccaaggcattgccgaccacgaaggtgacgaccaacaacaccagccgtccggtgagccccaggtcgcccacgctgatagccaccgccaggcgcgtggtgttaccgctcatgaacgagacgaaatcgccgctggccataaaaccgatggcatcggtcatgcccgccagcactgacaggcaggccaccagcatcaagcccacgcgcccacgccagcgctgtcgatgggcgagcgtggcattggcgtaaggcttgcgggacgaaggcagcatggggccggtttcctcggtgagattatccggccactaccgtaggatgctttgcctgtccgcgcaatgacctcagacacgctccagttgccagccggtggcgtgccacgtcagatggtgagtcggctcgatcgcctgcaagaatgcctcgtcatgggacacggccagcagcgcgccggtaaaccccttcaatgcctgctcaaacgccagcaccgattccaggtccaggtgattggtgggttcatccaataacagcaattgcgccggtgtctcacgccagagggcaacggccatcgcggctttcaagcgctcgccgccgctgagttgccctgcgggctgcgtaacccgcagcgcgtccagctgcaataacgccaggcgtgtgcgcagttcggcttcggccaggggcgtgtcgagcaggttaagttgctcgacaaggctgcgccggtcatccagcagcgccaggtgttgatcgatataggcactcggcaccgccacggtgcattcgccactgaccgcccgccaaaggcctgcaagcagtttgagcaaggtcgatttgccgcaaccgtttggcccacgtacggcaacgcgagccgggcctgtcaggttgagcgtcaggtagctggcgggtgccagcggatcgagccaaggcaactgcgcctgttccagcaccagtacctggcgaccattggggacgctcgagcctggtaatgcgagcagtgtgggcgtctcatccaccacgcgctcgtaagcttgacgtacctgggcgtcgagttggtttttgcacgcatgatgggcactgcgcacgttgctgacgacttcctttgccgcgcttttccagcgtgccctggtaaaacggtcgacgttggcggtctcggcctgtttacgtgcgcgtgcggcgtggcgctgcaggtcgtcgtgatctttttgcaggcgccgacgctcgcggctgcgggccagacgcgcctgttcccacgcagcaatcgcggcctgctggtgggtgtcgcgttgctggcgataggcatcgtagttgccgccatagacctgaatgcccaggggcgacagctcaatgatgcgacccatgacgttgagcaactgtctatcatggctgaccactaccagcccgccgcgccaatcgcgcaacacatgcaacagccaatcgcgtccggcagcgtcaaggtgattgctgggttcatccagaatcagcaactgcggcgccgccaacaacgccccgatcagcgcgaccctggccagttggccgccactgagttgatcggccggggtactggcgctgagggttggcaaacccgctgcatccagcgcgtgacgcaggcgttcggccaggtcccagcggtcgtcgatcagctccaggtcaccgaggcgtgcatcgccccgggccatgcgctcaagggcagccaaggccgcggcagttgcggtgatatcggcgatggtttgccctgcttgaaccgcgatggcctggggcacataggcaacattggcgggttttttcagggtgccggaggagggcagtagcacgccggccatcaatttcgccaggatacttttgccccgtccattgcgccccacgataccggtaggcgtttgatcaacggacaggtttacgtccgccagcaaggtttcgccattggcgaactggaaagacaggtgttgcagggaaacaagcgcgggcagccgtttgacgtcagtcatcagcacctccaaaaaatgtcgaacaggccaacaagcgcgccaggcggctcgttgcagatacattctggaaggcttagatgttcacgtcggcggtcatcccgtgagtcagaagggaggcagagcctaacccacgttaactttgtgcggcaagtcttcggccagtttttccaagaacatcgccagtgcgacctcttcggctttcaggcctttgcgcacccgcggcttgggcaacttcgacaattggccgaggctgaaatgctcaagcaccgccgggtggatatagcacttgcgacacaccgccggcgtgttgcccaactgccgggcgacatccttgaccatcgccaccacatgccgcttggcgtcggattcgggctgccacgccaactcgcgcaacaccgccagcgccatcgccgtgccggcccaggtgcggtagtccttggcggtaaaatcttcgccggtcaggctgtgcaggtagtcattgacgtcctgggagctgacggtatgccgctcaccgtcttcgtccaggtactggaacaggttttgccccggcaattccatgcagcgcttgaccacccgcgccaggcgccgatcctttacgctgacttgatgctccacgccacttttgccacgaaactggaactggatctcgctgcccttgatgtccacatggcggttgcgcagggtggtcaggccgtaggacttgttctcgcgggcatattgggtattgccgacgcggatcagcgtggcgtccagcaacatcaccaccgtggccagcactttttcgcgggtaaacccgggttcggcgatttgcgcttcgagctgtttgcgcaatttgggcaaggcggcgccaaaggcctgcaagcgcgcatacttgtcgctgtcacgcacctcgcgccagcgtgggtggtagcggtattgcttgcggccacgggcgtcgcggccggtggcttgcaggtggccgcgagggtcggcgcagatccaaacgtcggtgtaggcgggtggcaccgccaaggcgttcaggcgtttgatttcgtccgcgtcggtaatgcgctcgcccttggcgttcagatactggaacgtgcctcgcacttttttacggcggatgccgggctgggtgtcatccacataatgcaggtcgcggggcaggtcggcgggtaacgaagagtcaggcatgggacgggttccttggcaacaaatcaggccggtatgtctgattgaccgcagcaccctgcggtcgtgccaaatggttaagctagcactgccaccgccttgatttgcgcccacagtgtctggcccggatgcagttgcaactggtcgtgggagaagcgcgtgatgcgcgccagcaagggcgtgccgccggcgtccaggcgcaccagcacatgggcgctgttgtccgcgccgacagtctgggtgacggtcaccggcaagcggttgaggatgctgctgtgttcttcggcctgcaggctcaggctcacatcccgcgcctggaccttgacccgcagtgggttgcccaccgccagcggggcatgggccacgcgcatctgcaacgggcaatcgggcaactgcagggtgagcaactgatagtgcgcgtcgtaggcgacgacgctgccagcgatcaccacgccggcatcgtcgcccagcgccaggggcaggtcgaggcgcgccagggtttcgccgatagggccgctggccagggctttgccgtcgctgagcaagacgatatggtcagccagccgcgccacttcgtcctgggcgtggctgacgtagagcaccgggatatccagctcgtcgtgcaggcgttccaggtaaggcaatatctcgcttttgcgcgggctgtccagggccgccagcggttcatccatcaataacagcctggggctggtgagtaaggcacgggcgatgccgatgcgctgacgctcgccgccggacaagtgttgcgggtgacgctcaagcaaatgcccgatgcccaatagttcggtggcctgggccatgcccacgcgccgctgcgggcgtggaatacgcttgaggccgaactccagattggcgcgcaccgacaggtgaggaaacaggctcgcctcctggaacacatagcccaaagcgcgtttatgtggcggcacaaacagccctttgcgactgtcttgccagacctcgtcgttgatttgcacaaagccgtgttcggcgcgttctaaacctgcgatgcagcgcaggcaggtggtcttgccggagccagaatgcccgtacagcgcgctcacgccacggccgggcaattgcaggtccacatccaatgcaaaggcggagtacttcagctgcaggcgtatatccatcatggcgatcagctccagcccatcttggttttacggctggaatagagcgccagcaacacgaggaaggcgaacaccaccatggccccggccagccaatgggcctgggcatattccatggcttcgacgtggtcgtagatctgcaccgagacgacacgggtcttgtccgggatattgccgccgatcatcagtaccacgccgaactcaccgacggtatgggcaaagcccaggatcgaggcggtgataaacccagggcgtgccagcggcaggatcaccgtgaaaaacgtgtcccacgggttggcgcgcaaggtcgcggccacttccagcgggcgcgtaccgatggcagaaaacgcgttctgcaacggctgcaccacgaagggcatggagtagatcaccgagccgatcaccagcccggcgaagctgaaggtgagggtgcccaggcccagccactgggtgaactggccgacgtagccgttgggccccatggccaacagcaagtaaaaaccgatgaccgttggcggcaacaccaacggcagtgcgaccactgctccaatggggccgcgccacttggaacgggtgcgcgacagccacagggcgatcggtgtgccgatgatcaacaggatcagagtggtcagcgaggccagtttgagggtcaaccagatcgcagaaaaatcagcactcgacaggggcatttacagctcgtaaccgtaggatttgataacggcagcggctttcgggcctttgaggtagtccaccagggccttggcggcggcgctgtccttgcccttgttgaggatcacggcgtcctgtttgatcgggtcatgcagggaggccggaacaatccacgccgaaccgctggtgactttgccgtccttgtagatctgcgacaaagcgacaaaacccaactcggcgttgccggtggaaacaaactgataagcctgggtgatgttctggccttcgacgagcctgtccttgaccttgtcagtcaagccttctctggccagcacctgggtggcggctaagccgtagggtgcagccttgggattggcgatggacaaatgcttgaactcatttttcttcagcacctcgcccttggcatccacatagccttctttggccgaccacagcgccagggtaccgaccgcgtaggtaaagcgtgagcccttgacggtagcgccttcgctttcgagtttttgcgcggtggtgtcatcggcgctgaggaacacttcaaaaggcgcgccatttttgatctgggtgtagaactgccccgtggcaccgtaagccgcgaccagtttatggccggtgtctttctcgaagtcggcggcaatcgcctggatcggggcggtgaagttggcggccacggccacctgaacttcatcggcatgggccgtacccaaggcaaaggcggcaagcaggggggccaggcgcgaaacgcgggtcatcatgaggcaactccttgaaggtgtacggcagggtgtaggaaagagggcttaccgctatgtatgggaatatatagcggttggccattgccggtacagtgccaagttgctgctcaaatcagccgcgggtgagtttgctcaagctgtgctcggctaattggcgggtcaggtcgtaggtggacaggtctttgcccagccccagggcctggcctgcccacaggttgctgaaaccggcctcatccttggccttgagcggcatcaatgcgcctccggctttggggaacgccggggccgccgggttgatggcgccgagttcacgcatcacccggttgacgatgccccgcgccgggcggccggtaaacaggttggtcagcgcggtttcgctggcctgggcatggcgcagcgcatggtgatgggaggcgcttacagtggcttcgggcgtgaacaggtaggccgtgccgatctgcacggccgaagcgccgagggcaaaggccgcaacgatgccacgcgcatcgccgattccgcccgcagcaatcaccggcacgctgaccgcgtcgacaatctgcggtagcagcgccatcaagccgatctggctgttgaggtcatcgctgaggaacaggccacgatgccctccggcttcaatacccatggcaataatcgcgtcgcagccgtgctgttccagccacacggcttcctcgacggtggtggccgatgacagcaccttggcaccggtggcttttacccggtcgagtaaggacttctctggcaagccaaagtgaaaactcactacttctggccgaaactcttctaccacttggcaggctgcgtcgttgaacggcgcgcggttggataccggcgttggcgcatcgaagtcggcgcccagttcatggtagtaaggttgcagcaaggccttccaagcctggtcccgcgcgtcatcgacatcgggcggttgatggcagaagaagttgacgtttagcggcgcatgactggcctggcgaatgagggccaaggcctcgcgcagttgctcctggctcagcgccgccgcaggcatggagcccagggcaccggcttgctgggcggcgatgaccatggcggtggtcgtcgcgccagccatcggcgcctggataatcggcacctcaatgcccaacaggtcaaggatgcgggtgtctggccaggtgctcatggggtgcttctccagcgttagtagggcttttcgctgttttagcagggcaatcagcacccggccagtctgttttattcactggacggaagcggcgttttgtggggctgggtttcacgctcgagtaactggcgcttgcgctctacgccccagcggtagcccgacagctcgccattgctgcgcaccacgcgatgacagggaatcgccaccgccaggtggttggcaccgcaagcctgggccacggcgcgaaaggaggagggtgcaccgatacgctcggcaatctgcgcatagctggcggtgctgcccgcagggatttcgcgcaacgcctgccacacccgctcctgaaaggccgtgccgcgcaggtccaagggcaaatccaggcccacggcaggggcttcgacaaagccgacgacgtgggccaccagttgttcgaaaccctgatccgcgccgatcaactcagccttgggaaactggtcttgcaggtcgcgcaccagtttgtccggatcatcgcccagtaaaatcgcacacacgccacgttggctttgcgccaccagaatcgcccccagcgagcattggccaacggcaaagcggatggtgttattggcgccgccgcctttgtagtctcggggtttcatgccgagcacttggtcggcggcttcataaaagcggctattggaattaaagcccgcgttgtacagggtgtccgtcaccgaatgctggcccttgaggccgtcgcgcactctgcgcgaacgcagggcgctggcgtaaccctttggggtcaacccggtgttggctttgaatacgcggtggaagtgaaacggactcaacccggcgcattgggcgagcatgtccaggctaggcggggtttgggcttgttcgatttgccggcaggcctcggccaccagttgcccatggtgagcggccaactgggtctggtcgccggcagcgcgtttactcgggcgataaccggcggcctcggcctgcgccggcgtgtcgaagaactcgatattttccgggcgcggtaagcgcgaggcgctgctggggcggcaatacacgccggtggttttcacgccgtagacaaatagcgcgtcagccttggcatcacgggcaataatcgcagcccagcgcggatcgtgttcgttgttcatggcctgcactcttgacggttccggagcagattaagcccgccgctcgcgcccgacactccgaagcttgcggtcaaattacccagcggtgcgaaaggtcaggttgatgcgctgcgggcccatgaccggatgtacgccgtccttgattggcatcacgccatgaaagcgcaggcgatcaacgccgccccacaccaccacatcaccatgaaacagcgaaaccttttgggttttgtcgctgcgcgaatggccaccgaacaggaaaaccgccggcaaccccagggacaccgagaccacgggcgcgctgtagctgcgctcattcttgtcctggtgcagggacattttcgcccccggtacgtaacggttgatcaggcaggcatcgggttgaaaaccgctgaaaccggcctcggtagccgctgccaccgccagctggcgcaatgtggcgggcatgacgggccagggttgctggctgcgcgggtcgagtgggctgtagcgatagccacgggcgtcggtggtccagcccagctcgccgcaactgctcagcgccgccgacatggtaaagccgccgggggtgaccatctgccgaaacggtgattgagccaggacacgccgcagttcaggcaataaccgctcgatccagggcagggcatagcccttcagtacgtaggattcttcgccaatttgctcgcgcccggcaggctgttgcaaggcatcatcggcaaacaaatcggcggtagggcccggcatggcttacagcgccttgctcacattgatgtcggtgatttcgtcgctggcatcatgaattttcgccaaggcttgcttggcttcatcgacgctgttgctatgcaactgggcgaattcaaagcggcgttcgccgttgagcttgtacttgatgacgtatttggttgtggtggtcacagcttttttcctgtcaggtgttcgggtcagctcagcttgctgctggtacgacgaacgatacggatcttgtgggacaacgcaggcttgcgggtcacgctgatggcgcgacgggtcaccacatccagggtgatgttccagaagccggtgctcggtgcggtgatcttggccgggaatttatcaaatgcgccgccgtggtaggtatggcggccgccgtttttgaaactgcgaaagttcgcatcactcatcaggcgaatattgcaggtctgcgagcattcgatgacgacaatgtctccctcgttgaggtgctcacgctggtggatgaatttcatgaggtgtctccagaagggctttttctgaaaaatcagaacgatacgtaggttaagatggagtttatcagccccagcgcgtttattatcgggccgtcgtcgacgacttcgacaatttaaaacagttatttaccgagttatcacagataaatcctacgttggtgggagaaaattaccatccccgctgtcgtagggtctttatcggaggtttttgtatgaagtggagtgtgttggtgctggccttggcaataggtgggtgtgcttcggttgcagatatcaagcagaccccgccaacattggtggtcatctcagggaagaaaccgcaggaatatgcggcgtgtgtggtgcgcaaattggaggcgacccgtcggccgccgcagatcgagccccataaagacggtattcaggtgatcgtgccgcagaaattctcggcagacccctcggcaatctttgaaattgaagaccgctccagcggtagcagcatcaagctttatgaaagcatgtccaatgtgcccatccgcccgggcgacgtgaagaaggcaggggaagagtgcatttccggttgagccacaggctcatccctcaaacccgataaaaaaagccatcaccctgcagggacggcctgcatccgttaaactgtcgggcattcactacaaagatgccgctcaaaccctgggtttgagcggcatttgtttttctggaaagcccgttatgaaacgagaacacgtcaaagcccgccatgctgaaggccagatttcagccacccatgtcatccagaaccccgccgacttgggcgagtggatcgtttttttcaagaagagcggcgggcgcagctacttcctggtggacgagcaggatgaggtcgaatcatttgcgcgcctggatgacctgatcgaaaccctgcgtggcctggggatcaagtttgctgaagtgcacctgtagcaggcttacttgcagaccaccaccacgctgcggcctttgaagttgcccacgtcctggcccaaggtcttgtcgctctccttgagcgccggcgttccgttagtgccgacgatgcggtaaccggtgcccgcgcaggatgcgtccgctttctcgtagcaactggcccatgaattggcctcgcccgagcagtcgatggtcaagccttgttcgccatttttcagcaaggtgtcggaagcggtagtgcagccggcgagtgccagtactgcggtcagtgccaggatctttttcatagaggttcgtcatcgaggtattggaagggcgcgctgacactgtcgtggcgttgtcgaaggttatagcgaacggccatctaggtacagacaaacaaaaaagcccctttcacggggcttcttgcgcaacacatgaggcttacttggttttcggccgcttgctcgatgcatggcccgcctcatccacaaacacttcagcgacggcaatcgccatgctctcggtttcgaatacaccggcaacgctgtcgccgtgaaaattgatcaagtgccagccatctgctcgcttcgtgatcaggtagccgtttacacctttgggttctgacatctgttggcaatctcgtggtcttggttcaaggcgcccatgatagcgccaaatgccggggcagggcgcaagttgttgcgggtcagtgccagaggggcaaaagcgtgctaaaaccattgcagcccttttaaacaaggggccaagtcgggggctgactgaccgttggtgacaccctttgcaggatcagcggaacttacgccgacattttttctctatgatgacatcgcaacgccagcaggacccattgtaaggtgactgcggcctgattagactgcgccgaattccgtacgcacagccctttgtaaggactcatatgatcaagaaatgcttgttcccagcagccggttacggcactcgcttcttgccagcgaccaaagccatgcccaaagaaatgctgccagtggtgaacaagccactgattcagtacggtgtggaagaggctctggatgccggtttgaacgagatctccatcgtcacgggtcgtggtaagcgcgcgctggaagaccacttcgacatcagctatgagctggaaaaccagatcaagggcaccgacaaggaaaaatacctggtcggtatccgtaaattgctcgacgagtgctcgttctcctacacccgtcagactcaaatgaaaggccttggccacgccatccttaccggccgcccgctgatcggtgacgaaccgttcgccgtggtcctggcggatgacttgtgcgtcaacctggaaggcgacggtgtactgacccagatggtcaagctctaccagaaataccgttgcaccatcgttgcggtgatggaagtcaacccaaccgaaaccaataagtacggtgttatcgccggtgatgatattggcgatggcctgatccgtgtacgcgacatggtcgagaagccagcaccggaagatgcaccgtcgaacctggcgatcatcggtcgttacatccttaccccggacatcttcaagctgatcgaagagaccgagccaggcaagggcggcgagatccagatcaccgacgctctgctcaagcaagccaaagacggttgcgtgattgcctacaagttcaagggccaacgtttcgactgcggcggtgctgagggttacatcgaagcgaccaacttctgctacgagcatttctacaagacgggcaaggcttactgattcacgcttgccggtacgttttaagcgaaagccaccctcgggtggctttttcgtttttcagccccatgtaagtcggtatgctggtgtcctgccgaggagagtgaaatggcctacgattttgacctgtatgtaattggcgccggttctggcggtgttcgcgcggcgcgctttgccgctggctttggcgccaaggtggccgtggcggagagccgctacctgggtggcacctgcgtgaacgtcggctgtgtgccaaagaagctgttggtgtatggcgcgcattttgccgaggattttgagcaggccagtggctttggctggtccctgggcgaggcgaactttgattgggcgaccttgatcgccaacaaggatcgcgagatcaaccgcctcaatggcatctatcgcaacctgttggtcaacagcggcgtgaccctgcatgaagggcatgcacgcctggttgatgcccaccaggtggagattaacggtgagcgcttcactgccaagcacatcctgatcgccaccggcggctggccgcagatccctgagattccagggcgcgagcacgccattggttccaatgaggcattcttcctcaaagagctacctaagcgcgtgctggtagtgggcggtggctatatcgccgtcgagttcgccggcatcttccacggcttgggtgcacaaacttcattgctgtatcgcggcgacttgttcttgcgcggctttgatggctcggtgcgcaagcatctgcaagaagagctgaccaagcgcggcctggacttgcagttcaatgccgacatcgagcgcatcgataagcaagccgacggcagcctcaaggccacgttgaaggatggtcgcgtgctggaagccgattgtgtgttctacgccaccggccgccgcccaatgctggataacctgggcctggaaaacaccggggtcaaactggacgagcgcggtttcgtcgcggtggatgatctctaccagaccgccgagccgtcgatcctggcgattggcgatgtgattggtcgtgtgcagctgacgccggtggccctggctgaaggcatggccgtggcgcggcggttgttcaagcccgagcaataccgcccggtggattacgccaatatcgcgacggcggtgttcagcctgccaaatatcggcacagtcggtctgacggaagaggatgcacgcaagcacggccacaacgtgcagatctttgaaagccgtttccggccgatgaagctgaccctcaccgattgccaggaaaagaccctgatgaagctggtggtcgacgccgacaccgacaaagtgctgggttgccacatggtcggcccggatgcgggtgaaatcgtgcaagggctggcgatcgcgctcaaggcgggcgcgactaagcagcatttcgacgaaaccatcggcgtgcatcctacggcggcggaagaattcgtcaccatgcgcacgcccgtggcggactgatcaggttggctctgctgcttctggcgccgttgcaacgacggccgccaggcgcagcgcttcgatgcttgcctgggccttgatcaggtccagctcaagcgctttgttgtgctgctgatgttccagtagcgcagcttggcgtgattggctgtcctgcacggccacgcgcaggcgttcctggagcagggcgcgttcgctgtcgatctggctgagttgttccttgagtttcagctgtagcgcctggtcctgacgagtttgctcctgcagcgcattcaattccttggcggtcgctcgctgctcactcagcagacgctcgttatcgcgatgcaactgggtgatctcatcctggcgcaccagcgcgctttgctgtgcctggcgcaattcggcctgaacctgctgcaactggccttcatggcgacgctgttcctgctcgcgctgctccttgatggcagtgcggtaatgctcaagcgcatcacgggcgtgcaggtgtttttcttccagtgagcgaatctgctcgtccttgtcgttgagccttagctcgtagtcgctgcatgcctggctcagcccggcgttacgggtttgctcggtctgcaagctggtgctggcggtttgcagcgccgcgctttcttcggccagggccgcggcctggatatcaaattgctgtttgagctgggtgtgcgcctcttccagggtttctacctgggcgagcagggcggctttgcgttgctcgaattgcgccagggccaggtcgatcggctcttgggccttctctttcaggcgttgcgccaggcgtgcgaccagttcgccaagctcatcgtcaattggcgcctgagtgatggtttgtcgtgattcgctttcgtccagctctttcaaatagcgatgaatcgtggttttcgagccggtattccccatttcgatacgcactgcatcgatgctggggttttcgccgcgggcgaggatcgccaggcgtgccgtctgcactactgctttgtttatgccgccacgagccatggggtctccgtcgatttagtactgtggtacatggtatgtagatacataccatatcatgattaaaaactcgtttaaattcatgatttaacagatgggatattggcgtattatcccgtgtcatctgtgttttcctccgccatccatctgtcagcagtacgaaaagacgcctatgagcgacctggaccgatatctcaacgccgccacccgtgacaacacgcgccgcagctaccgcgcagccatcgagcatttcgaagtcagttggggagggttcctgccggccaccagtgacagcgtggcgcgttacttggtggcgcatgccggagtgttggcggtcaataccttgaagctgcggctctcggcacttgcgcaatggcataccagccaagggtttgccgacccgacgaaggcgccagtggtacgcaaagtgctcaagggcatccgcgccgtgcacccggcgcgagagcgacaggccgagcctttgcagctccagcatttggaacaggtgatcgccgccctggacattgaagccaaacaggccagcgagcatcacgaccaaccgcgcttgctgcgggccaagcgcgatgctgcgctgattctgctgggcttctggcgcggctttcgcagtgatgaactgtgccggttaagcatcgagcatgtgcaagccgtgcccggcgcaggcatcagtctgtacttgccgcgcagcaaaagtgaccgcgataacctcggcaagacctaccagaccccggcgctgttgcggctgtgcccggtgcaggcttatagcgagtggctcagcgcctcggctttggtgcgcgggccggtattccgtggcattgaccgctggggcaacctgggcgaggagggcttgcaccccaacagtgtgatcccgctactgcgccaggcccttgagcgcgcaggcatccccgccgagcaatacaccagccactcgctgcggcggggctttgccacttgggcgcatcgcagtggctgggatttgaagtcgctgatgagttacgtcggttggaacgacatgaaatctgcgatgcgctatgttgaagcgacgccgtttctaggcatgaccctggcaacccaaccactgatttgagatttcttctattaatacagttacctgatagagaaaaccaatcgccagcatcaggtttgccaatgagccatcgaccgaaagagccggtaggattcatctcatcaacttcttaacccctgacggagagtcaacgatgcctatcatcaacagccaagtaaaaccgtttaaagctaccgctttcaaaaacggcagcttcgtcgatgtgaccgacgctgacctgaaaggcaagtggtcggttgtattcttctacccagccgacttcaccttcgtttgcccaaccgaactggaagacctggctgacaactacgccgaattccagaagctgggcgtcgaaatctacagcgtttccaccgacacccactttgcccacgctgcctggcacaacacttcgccagccattggcaaaatccagtacaccatgatcggcgacccaaccctgaccatctcccgcaacttcgacgtgctgatcgaagaagctggcctggcagaccgcggcaccttcgtgatcaacccagaaggtcaaatcaagatcgttgagctgaacgacggtggtgtaggccgtgacgcttccgagctgctgcgcaagatcaaggccgctcagtacgttgctgcccacccaggtgaagtctgcccagccaaatggaaagaaggcgaggccactctggcgccgtctctggacctggtcggcaagatctaagtctgtgaacgcgtatcaagggcgggtatccgcacttaagtaagctgcatccgccctcaaaacgcccgggcgagattcgctcgggcgtttttttgtctgcaataaaccgaatgaacaggaaatcgcccgtatgttggacgccaatcttaaagctcagttgaagtcatacctggaacgggtcacccagccgatcgagatcgtcgcctccctcgacgacggtgcgaaatcccaggaaatgcttgctcttttgcaggacgtaaccagcctctccacgctgattaccctgaacaccgatggcaatgatgcgcgcaagccatcgttctccatcaaccgcccgggtgccgatatcaacctgcgtttcgccggcatccccatgggccatgaattcacttcgctggtgctggccctgctgcaagtcggtgggcacccgtcgaaggccagtgtcgaggtgattgaacagatccgtgccctcaaaggcgagttcagcttcgagacttacttctcgctgtcctgccagaactgcccggacgtagtccaggcgttgaacctgatggccgtgctcaacccgaacatccgccacgtcgcgattgacggtgcgttgttccaggccgaagtcgatgagcgccagatcatggcggtgccgagcgtctacttgaacggggtcaactttggccagggccgcatgggcctcgaagagatcctcgccaagctcgacactagcggtatcgagaaagccgcagagaaaatcagcgccaaggacgccttcgacgtcctggtggtgggcggtggcccggccgggtcttcggctgccatctacgcagcacgtaaaggtattcgtactggtgtggcggctgaacgctttggtggccaggtgctggacaccatgtccattgagaactttatctcggtacaggaaaccgaagggccgaaactggccagcgcactggaagcccatgtgcgtcagtacgacgtggacatcatgaacctgcaacgcgccagccgcctggtaccggcaaaaaatgccggtgagctgcacgaaattcgcttcgaaagcggtgccacactcaagtccaagaccgtgatcctggccactggcgcccgctggagagaaatgggagtgcccggcgagcaggaatacaaagcccgtggcgtgtgcttctgcccgcactgcgatggcccgttgttcaagggcaagcgtgtggcggtgatcggcggcggtaactccggcgtggaagcggccattgacctggccggtatcgtcagccatgtcaccttgcttgagttcgacagcaagctgcgcgccgatgccgtgttgcaacgcaagctctacagcctgccgaacgtggatgtgatcaccagcgcattgaccagtgaagtcaaaggcgatggccagaaagtcaccggccttgcctacaaggaccgcgacactggtgagttcaagaccatcgacctggaaggcatctttgtgcagattggcttgctgcccaacactgactggctcaaaggcaccgtagagctgtcgccgcgcggcgagatcattgtcgatgcccgtggcgagacttcactgcctggcgtgttcgccgccggtgacgtcaccaccgtgccgtacaagcagatcgtgattgcagtaggcgagggcgccaaggcttcgttgagcgcgttcgatcacctgatccgtacctctgctccggcgtaaatcatcctgagctgaaaatgaaaaaccccatgagcgatcatggggtttttctcgttcccacgctccgcgtgggaatgcatccggtgacgctccgcgtcacgcagtgcttattacatcggcgccggctgaatgatctcgacccaataagcatccgggtccttgatgaacgcgaggctcttcatgcggccatccgtcaggcgcttctggaaatcacagcccaaggcttcgaagcgttcgcacgccgcgacaatgtccggcaccgagatacagatatggccaaagccacgtgggtcggtgttgccgttgtggtaggcaaagtcggcatcgttttcggtgccgtggttgtgggtcagttcgaggatgcccggaatcgacttcatccactgggtacgctcggcggcgtcggccgggatctgggccttgtccactagggccaggaagtacaggctgaattcggcttccgggaagtcacgtttctcgaccagggagaaacccaggatgcgcgtgtagaagtccagcgacttggtgatgtccttgacccgcaacatggtgtggttgaacacgaagttcgccgtggcgttgtcgggttgggcggtgacgcccgggaaggtgttcaattcgtgcaggctcatgggccctccagaaaaaatgtgagatgagcggtccattggcttgcggtctgcctccatgcagacgggccatgatacgcaaggcgcaccggctgcgccaaatgaaaaagcgcgccaggcccttgcggtcagcgcgcgccgggccgcacactttgccgctggaaccttgggtgtttttcgcaatgatcgagtttcgtaggccgctgttgagtgctatgtgcgtgttgttgggcagcccgtttgtgctggccgccgagccgcaggtccattggcccagcggttggcaggtcgaagaagtcgtgcctgacggcgagccgcctgccaaacccctagcagtgtcccggcagcgagcgatcaagaatgatgaaaatggcgccacgttgatggtcatggagttgaccggaacgccaattgaggccggccataaagttaatcttgctggcgtgttgctggagatgcgcaagtccatccagaaagactttgcccgtggcggttatcaaagcgtgtgcagcaaaatgcaccccacgacattgagtcggcttgacgcgctggaaactacctgcgtgattaccgagaacggtcgacacgtattgtcgcaaacattagtcggtgcgctggatgtcgacaaagcctatgttttttcatacgccggccaggcgcaagcgtacgaggcgagcaaggaggaagtcagtttggtgcgtaacagtctgaaactttgacccgctcaagctgagcgaatttgaacaatatgaacgctgagttaagttcgattccgaaccgttagagcaaaaaaagccccgcgtatgcggggctattttttagtacatgtttcagccgcgaagccaggagtctacagtggcagcgccgtactcttctttccaggctttgaggccgcggtggttgccacctttggtctcgatcagttcgccggtgtgcgggttgtggtaaaccttgatcacccgtgcgcggcgctgtttaggcgcggcggcggccggtgcaccgcctttgcgtggcgcgggatcgaggatagcgatcacatcacgcaggctcttgtcgtatttgcccatcagcgtcttgagcttttcttcgaattcgatttctttcttcaggccagcgtcgttcttcaaggattccagctgtgcaagctgctcttgaagggctttttctgctgcgcgaaattcggcgagtctggacaaaatctgtactccaataatgtagttgctgatatcaactgcagacaaagctataagccaagaacgttaagccacgtcaacgaaaaagacccttctgcgagttctgcacaggcagaaaaaattgtagtagttaattcatcctgagtaaatcatgtcttttaaagaaagaccaatctttcatcataggccgcgcaaggctattccacgatgcccaacgatttaatgaattcatcgcagggtaatggtcggccaaacaggtaaccctgtaggaaatccacgccctgggccacgaggtactcacactgttgggctgtttctacgccttcggcaacaatgcctagatccagcttgactgataactctatgatgctgtccagaatatgccgcgacagcgcatccgcaccgatcatggcgacaaagctttgatcgatcttcaagtagtcgacgttgaaattgcgcaaatagcccaagctggagtggccggtgccaaaatcatcaatggcaatcatgacccccatttgatgcagcgcctcgaacaggcggcgggtggtctcggtgggttcgatcaactcccgctcggtcaactccagcaccagggtgacctggccgggtgggaacgcggcgaggaattcccggcagtcctgcaccagcgccatgtcctggcaatggcgcgcagtgatattcacgccgatatgaaagcctgggctgaagcgcgcggcatgaggcgccagttgcgcggcagtctggcgcagcagggcacgggtcatcggcacgatcaggccggagtcttcggccaggggaataaacaggtccgggcgcaccagcccttctttgggatgcttccaacgcatcagcacctcacacccggcccattggcgggtgtcaccgcgtaccaccggttggaaataggggatgaattcattggcccccaaggcgcgttgtaactcgtgggttggcgctgacgaacgtttttgcagccagtgagcgagcagccccgccaatatcccgaagaacaccaccaggctgaacagggccggataccgcgcctgcatatagcgccagacttcaccctcgggcattccggcctcgacactgtattgatagcgctcggaagccaggcgctgtggcgccacggcaaatgtcggcaacgcgccttgatgcactttgccgtcggcacccagccagttcgggccgacgtgcaataccaaatacgcgtaacggctgatcaagcgcaaggcgttggtgaggtggtaaccgtcaaccgaggcaaacgcgccttgatcgccttggaccaggcggtacaccagcagggcggtatcgggtgtgacggggttgcctttcatcaaccacaggcgcccatccacgtagtcgtcggggttgacgggcgattggtagcgaccgccaaacaacgagctgcaatagatgtttttctgccaggacagtgtggtggcccgcacaaacggccgacgcgtgacttgttcacgtagcgccaacttggcggcgctgtcacaaggtttaccggccagcggcagcaaagcctgggcagcgatggcggtgttgtcgagcatcaggtcgaactggcgcaccgcttcttgagcggtttgcgccgtgctttgttcaagggtgcgctcggcttgccaatacagaatcacaacccccagcaagatgggcaacacgccgctggttgcactgatgaaatagcgtgcggctcggcttcgtgggcctttgacggtcaggggcataggggcggtcagtcgtgagaaaaagagtgagataagccgatgatagatggcaatacgcaggcctgctcagttgttttgagcgggttgacctagccgttcggtcagttgtggcggggatttcatctaggcaacataaacatcgttgcaagaagtaagagactcaggaccgtacccctccagcctctctcagtgccgtgctagcccaattttggcgggccggtcggcgcgtgtctttcgaatgtcggaagccgccttgcagccttttaacgactccacaggaatttgcagcaatgaaaaaaatcgcactggccgttgccttgttgatggctaacagcgttgtcgctctaccggcgttcgcggcggacggcactatcaccctgaccggtgagatcactggcaccacctgcagcatcagtggcggggcaggcgctgcgcctggcgccgggccggactttgccattgcgctgcacaaggtccaggccagcgcactcaaggctgccgggcagacggcgggggtaaagccgttctttatccaagtcggcagttgcccgaaggatacggtggtcgcggtgttattcgagagcagcagcccggccatcaacccggcgaccggtaacctggtcaatcaggcgccagccacacccgaaccggcaaagttcgtggaagtacagattgtagacggcgtcaccaaccagcccctggatctgcggctgggcctgacttcgagtacctcgacagtgcctgacggcggcgcggtgacgctgccatttgcagctcagtacttcgccacgggggcagcgaccgccggcccgatcagcacgcaagtgctgtattccgtgacattcccctgatcaaggccagtgggcctggcgacctgccaggccctgccttgaaggaaggacgcatgctttttcgcacattactggcgagccttacctttgctgtcatcgccggcttaccgtccacggcccacgcgggagtggtgatcgatggcacacggcacatctacccccagcagcgccgtgaaatcaccctgcgcctgagcaacgacgataaacgggcaccgcgcctggtccaggtgtggctggatcaaggcgatgccactccagatccctcccatagcgacgtgccgttcagcctctcgcccccagtgtttcgcctggatccagggagaagccagggtgtgcggctggtctacacccaggatccgttgccgccagatcgagagtccttgttctggcttaatgccttggaggtccccccgaaaatcagtgcggccgaactcggtgaacaagcccctgaagggaatcatctgcagtttgcttttcgtatccgcaccaaagtgttttttcgcccccgtcatttgcctggcagtgcagaccaggcccccgcgcaactgcgctggagtctgaggcgcaccgagcgcgcagccgtactgcgcgtacacaaccctacggcctttcacgtgaccttcaacgaggtggcactggcgctgggccctcggcctgacgcccacctgataccggtacaagaaggcatggtgccgccaggtgccagccttgaactgcctgtacgcggcaccctgccgacgatccccgcggacgcccaggtgcatttcaaatacatcaatgattacggcgcattctccgcgccgcagcgagcccccctgaagttttgattatgtctgtttacctgccatttacggggcatcccgtgtttgcctggctgttgtgcaactcgcggctgatggtgtcgctgggtgtgttcacgaccttatgcctgccggccgaagccgcggcgctattgtttgatatcgaggcgtttaccaccggcttgtccacggcggtggatatttcgcgtttcaatacgggcaatgcattggcgcctggtgtctatcgtgtggatgtattcctcaatgggcaatccgcggggcgccgtgaaatcagctttgtctcgcgtgatgaccaggacaacgtccagccttgcgtgagcgccctggaacttgcccaactcggagtcgtgctgccacctgacgaacgcagcgccgacacgcagtgccgtgaatttacccaatggatccccctggccagcagccagctcgacattgagaccctgacgctcgacgtcaatatcccgcaggcttacctcagccgagccgcgcgcggttacgttgacccggcccgttgggacaaggggctcgacgttgcgctgctcaattacaccttcagcgccgcagcggtgacttcgggggcgggggaaggtcggggttacctgggcctcaacggcggcgtcaacctcggcgactggcgcctgcgccaccaaggcggccaggcctggacttcccgtggcggtctgttgccttatcaacacaccgccacgtacctgcaacggcccttgtcggcctggcgttcgcaactgacccttggcgacagcttcagtaacggccaggtcctcgacggcgtgcgggtgcggggcatcactctgtcgaccgatgaccgcatgctggcgccgtcgcaacaaggctatgcaccgcagatacacggcatcgccgacagcaacgccacggtaacggtgcgccagaacggctacacgatctacgaaacccaggttgccccggggccttttgtcatcgacgacctctatcccacgggctacggtggtgaccttaatgtcagcgtcaccgaggtggacgggcgccgcaccacctttgtcgtgccgtattccgtggccccacaattattgcgccagggcgccactcactacagcaccacgttgggccaagtgcagcaacgcggggtcagcaagaccagccccatggtgtttcagggcaccttgcagcatggccttaccgatggcttgagcctgtacggcggcagcgcggtctcccggggatacttgcagggcaaagccgggctggcgatgagtacgcccatcggcgcgtttgccctggacaccacgcactcgcgcacccgcgttgagggcaacggggtggttggcggacacagttggggcctggcctacaacaaaaacctgccattttccggagcccattttgcgctgggcgcctaccgcttctccacggccggctatctgagcctgccggatgctttgaatgtgcaggagctggcccgccagcatgggaacatcgagggctatgcccgccagaaaagccgtctcgacctgacgatcagccagcacctgggggaaggcaccttgagcctgtacggcagttctgttgactactgggcgagccggcaaggtcgccagacatccttcaccctcagctatggatcacgctggaagcagctcaactggaacatttcggcgcagcgctcaagggtcagcgacgccgacccacccagcgatcgtgaccacagtgacgcgatctttttcggccgcgcgttgcaacccggtcgcgtcgataatcgtctggcgctgaccctgtcgatgccgctgggccagggcacgtcggcgccgaccctgagcagcgctttgtcgcgcgacaccggcgaatcaaagggcagtcaacagcaagtgggcatcaatggcttgctcggcgaggcgtcagaggggcactacggcctggccggcagccagggcacggggagccaggccggttccagcttcaatgcctacgccgggtatcgcagcagcacggccaacctgcgcgcaggttacggccagagtggcaacaacgcacaagtgtccatgggcgccgacggcgggctgattgcccatagcggtggcgtgaccctctcgcaaagcctcggtgaagcgtcggcactggtgtatgcaccggatgcccagggcgcgcagatcggtgggggtgtacgcatcgactcacacggctatggcgtgttgccgagcttgcgggcctaccatcccaatgacgtggatatcgacccagaaggcatgcccatggatgtggagctcaaggaatcgaatcactcggtggtaccgacagggggcgcagtgtcgctggtcaagttcgagaccgtcagtggccgtgcggtggtgatcaaggcgacccatcgcaacggtcagccgctgccttttgccgctcaggtgttcgacgagcagggcagggaagtcggggtgattgggcaagccggcaaggcgtttgtgcgcggcgtggccgaccagggcacgctgaccgtgcgttggaccgaggcggcaagtgaccgctgctatatcccataccgtctgccaccgcggccaccggggcaccgccaggaaaatgccgaccaactggtcagccggtgccacgccaacaccgccaacaatgaggtcagcagccgatgatcagccccggtacgcaacgtttggcagggcttgtaatggtgacctgcatcgccctcgccagcgcgccccatgcccaagccaaggcgacgtgtacgcccgcgccgccgacggtgctgtcggtgccgcgtattacggtgcccgccaaccctgtggtcggccaggccctgggcaacccgggtggctaccccgttgaggtagcgcacgggttgaggtgcacatatccgcccaaccttattgttcgctattggtcgtccacgcggattgcacgggagattccctggacaggacgtaacttcttccactcaggggtcgtcatgccggttcatctgaccggcgtgcaaggcgtcgggtttgcgtttatggcgcaggaccgtgacgtggggccgatgcaaaccgtaaccaccggagtcacggtgctgcgcggaccgatccatcccggtttgcctacgtggggcttgcgcggccgcttgttcttcgtggtaaccggcccgatccagggcggcaccattacgccgcgtaccttcgcgggcttgtacctgtacaccagcgacacgcaccacgcgttcaacttcggcagtgtcgaagtcggcccgccgagtaaacccacctgcacggtctcgacgccctccgtggcgatcccgctgggggcggtggagagcagggcgttcaagggcattggcagcgtggccggcaatgccacccgcaccatcaccttgcagtgcgctggtggcgggggcgctgagagcgatgtgctgttgaccttgaccgaccagacccaaccggccaatcgcagtgaccaactgacattgaccgccaactccaccgccaagggcgtggcgctgcaactgctgtttggcaaccgcctgatcagctacggccccgacgccgccgctatcggcacgccgaatcaatggttggcaggcagcaccggcaacggcaccttccagattcccttgaccgcgcgctacatacaaaccggcgccaccgtccgcccgggcacggccaacgggctggcgaccttcactttggcctatcggtagtcggcgtgatgatccgagtcttattgaactgcgtgtccggtctggcactggcggcatctatggcgatggtgcaagcggaaatcgtcattgatcgcacccggcttatttacccggccgcggcacgggtggtaaccctcaccctgcgcaacgaggcggacagcccacggctggtacaggtatggatcgatgaaggcgacccccagatggcgccggaattgagtgacgtaccctttactgtcacaccaccgattctgcgaatggaccccggcaaggctcaagcgttgcgggtgatttatcacccggtacccagacaagccatgaccgatcctcaggaagtggtgtattggctgaatgtgctagggatacggcctactgacgcggcaagccatcaactgcaactggcgtttcgcacgcgcatcaaactgttcctgcgccccaatgcgttgcctggcagggcggaagatgccgtggcggcgctgcaatggcaactggcagacgaccgcccggtgctgcgggtgcgcaacccgagtgcctttcatgtgaccttgtccagcgtggcactcaaccttgagggcgtcgaataccgccatgaaaacccaccgatgctggcaccgcgctcaacggccgagttgatcatgccgggttgggttgtaccgtggcgaggtacgccgacgctgcgcttcaccacattggatgactatggcgcgacgcatgagagcacgcagcgcataggccggtaactaagtaggcgaggggtacagcccttgtgccagcgcgatgaatgccagggcagccggggaagactgacgccgatccagcatcacagaaccgatatgcatgccgatgttactgggcggcgcaatcatcctgctgggtatctacctgtgcaacaaaccccttgcgccgggcagggcaatggggatttgataagagtacggacaaacctggttacgctgtgtagaatcagtttacgcatacaagaatatggacttgcgctcacgcaagcctcggccgtcagagactgatgacaccatgaagctacttggctcccccctcatctttggtgacttcctcgcccgtagcgtgcgaggcctctcttgtgcgccaccctccagcctcatccttgctcgcaactaatcaattgctacctacaagaatgatgaggcaccgaacatgaccgaccaactcgcaaacccaatgggcctgatgggctttgaattcatcgaatttgccgcgcccaccccaggcaccctggagccgatcttcgagatcatgggcttcaccaaagtggcgacccatcgctccaagaacgtgcacctgtatcgccagggcgagatcaacctgatcctcaacaacgaacccgacagcctcgcttcctatttcgcggccgagcacggcccgtcggtgtgcggcatggcgttccgcgtcaaggactcgcaacaggcctacaaacgtgccctggagctgggggcccagccgatccacatcgacaccggcccgatggaattgaacctgccggcaatcaaaggcattggcggttcgccgttgtacctgattgaccgtttcggcgaaggcaactcgatctacgacatcgacttcgtgtacctcgaaggcgttgatcgcaacccggtaggcgcgggcctcaaggtcatcgaccacctgacccacaacgtctatcgcgggcgcatgatttattgggccaacttctacgagaagctattcaacttccgcgaagcgcggtacttcgatatcaagggcgaatacaccggcttgacctccaaggccatgagcgcgccggatggcaagatccgtattcccttgaacgaagagtcgtccaagggcgccgggcagatcgaagagttcctgatgcaattcaacggcgagggcatccagcacgtcgcgttcctcaccgacgacctgatccagacctgggacgcgctgaagaagatcggcatgcgcttcatgaccgcgccgcccgacacttactacgaaatgcttgaaggccgcctgccgaaccacggtgagccggtggaccagttgcaatcgcgcggcattctgctggatggctcgtcggttgccggtgacaagcgtctactgctgcagatcttctcggaaaccctgatgggcccagtgttcttcgaattcatccagcgcaaaggcgacgatgggtttggcgagggcaacttcaaggcgctgttcgagtcgatcgaacgtgaccaggtgcgtcgtggtgtcttgaccgccgactgattgactggataacgaaaaagcccggtttttaccgggctttttcgtgtgcgttgcgttctgtcgcaattgaacggcggtgaaataggaacagatgtttcttcacatatcacatagagggcaggacgcaggaaaagcctgcgtctgaaccatgaagaggctctcttatgaatgtaaattctcctacccctcaacgcccgatcggcccatctgtatcaacggagcaggcagggcctgtgcgcaatgtccgttcaaccggcaatgcagacccggtcgatcaggcgcgtaaaaagtttctcgatgacggtgaaaccgaatacttgggcggcacactcaccgccggggggtatcagatgacgaaggcggcagtgaaacctgacaaacccggcgcgccatacgtaagcgtttcgacttttgccgtcgatggcgtccaatccaaagacatgatggtaatcaaacgtgtgcccgcgacggccgaaggccctaacttcatcgtgtatatgccggaagatgaagtgacgtcgtttcatgagttcaacaccgttgaagagctaactgaatgggttaaggctgtagccaaaaaccctgccgagctggatcgatttgcgcggcacttttctcattctgaagcacccaagcaggaggaacgggtcaggacacgactaagcgagtttggctcagaaaaagactccagcgtggtggtgggaagttttggtcgagagcgaggcgatattttcgagcgtttgaacaaggacgtgaccgtcccgccagttgaggtcaatggcctatccaacgtgaagctatacaagctggagtccaatggccaagcgacctatatcggtacccgggaagatggaaaaaacgtcctatttgattacgacgcttatgggaatttcaggggtggcagtcaggacggttattacttcgtcagaaacgggctgaacaataaggacccgcttggcgaacccatcacaatcgctgagttcaccaaacagaaagttgcagcccaagcctatagcaagacggggcctaatgatctgagcgacttttggggttatctcatcaagcagctcagaaacccgggcgacggtcttgggactgcattgcaacagttcggagttcctgacgacgtggcggcctccatcgaagaggtgctgaaaaaccccgtaaagggcacgctgcttcagttgaaccacgataatcggctcggtaagatatttggcgtcagccaggaagtgatggatgcccagctggagaaatttggcaatgaagcccagagtaatattccccagtacggcaagtggcgggataggttgaacacagtggctgacgtcatcgaaaggaaggtgggcaccccagaagaggcgacacccgaagtgaaggtctgaatcaatcttcgctgtcatacagaggggtacggataccctcgcaatacccgttcattcccagcttcccattcaagcgcgacgctggcgcaccaaatgcttgaacccctcatacaccagcaccattaccgccagccagatcggaatataggtcagccactgtccgccctcgatcccttcgcccaacagcagcgccactccgagcagcaataccggctccacatagctcagcagcccgaacaggctgaaagccaacaagcgactggcaatgatgtaactcaccagcgctgaggcactgataaggcccagcatgggaatcaatgcatagagctttggatgcccatccagtacggcaaagccttgttcgccgttttgtacaaaccaccaggccaccggcagcatcaacgccatatccagccacagcccacccagatggtcggtgctcaggtacttacgcaccacgaagtacaccgggtagccgatgatcaccaccagtgttgcccaggaaaaacctccggcctgatacagctcgttcaacacgccaagcgccgccaacaccacggcgatctgttgcagccgtgacagacgctcgccgtagaccaggcgcccggtgagcaccatggtcaacggcagcaggaaataccccaccgacacgtccaggctacgcccattgagcggcgcccacatgaacagccacaactgcacgccgagcagggcagaagacaccagcacgccgccaatcagccgtggcttagccgccagcctgcgcagcagttccaacaccctgcgccactcaccgctgacaatcatgaacaccgtcatgcagggtacggtgagcaacatgcgccagccgaaaatttccaggccactcaggggggtaagcagcgatgtgaagtaatacatcaccgcaaacaacaccgaggccaagaccgataacaccacacctttagacacgctgtcctcgcgaaagccgattatttcgtcggcagtctacaggcgtaccaatcgaccggatacaaaatgcccgacatcgttgaaccccggcgaggacgaatgccccggcgtgaccaacgaatcaatgaacgcctcgtcttcggcgctgatctgcaccgccagcgccccggtgtaggcgtcccactgcgcctcggtccgtggcccgacgatcgccgagctcaccgccgcattgttcagcacccaggcgattgcgaactcgacgatccctacgccacgcccttgggtgtattgctggatctgctgggcaatgcgcagtgattcaacccgccactcggtttccaggatgcgcttgtcctggcgcgcggcacggctgccgggttcaggcgtgacgtccggtgcgtacttgccgctgagcacccctcgggccagcgggctgtaaggcaccacgcccagcccataagccgctgcagcggtgatctgttccacctcggcctggcgattgacgatgttgtacaacggttggctgatgatgggtttatcaacccccaggcgttcagccacgcgaatcacttcagcgatgcgccaaccccggtaattggacaggccccaatagcgaaccttgccttcgcggatcaagtcaccgatggcggacacggtgacctccaacggcgtgtcgtggtcttcgcggtgcaggtagtagatgtccaggtagtcggtgtccagccgtgccaggctggcgtccagcgcagtgaacatacgcttgcggctcaaaccgctgcggttgggcacgccatcggcagggccgaagccgactttggaggccaccacccaatcgtggcggttgcgtgcaatcgcctcaccgacgatttcctcggagcgcccgcctgtgtacacgtcagcggtgtcgatgaaattgatgccctggtcccaggccttgtcgatgatgcgcagcgaatcttcggtgctggtctgttcgccaaacatcatggtgccgagggtcagagcgctgaccttcaacccggagtggcccaatgtgcggtaaatcatgcaaagctcctcatggcaggcaaaatgtaagtgatgcaataccagacccgagcgctctggaacaagccctgagcgcatttcttcatgtgcgtagcaaagtcacgcagcgcgcctgtaaaaaacgatgcagcactttcacgcgttccgacacttgcaggcggttcgggcacatcaggttgaacggcgtgggttcgccttgccagtcgggtagcaggggcaccagccgtccggcctgaatatcacgggccacgtccaggttagctttataagcaatgccatgccccgccaacgcccagcgacggacaatctcgccgtcatcgctgaggtagtcaccgctcacctcaacctcttgaagcaacgccccctggcggaaataccaggtgctattggcctggccccggcgcatatagcgcagcgtgctgtggtgggacaaatcttcgggtgtatgcggggtgccgtggcgcgcgaggtagtcggggctggcgcaggcaatgcgatggtgatcgggtaccaccggcagggccacgaggctggagtccctcggcacgccaaagcgcaaggcaatgtcgacggtgtcgcgaaacaagtcggcattgctgtcgttgagcaacagttgcaagcggatatcagggtgctccagcttgaactcatccagccagcccagcagcacattgcggccaaagtccgagggcgcggccaactgcaataaaccactgaggctctggccctgttgcttgatggcgtgctcgccttccgacagcgcctccagcgccacccgcacactgtccaggtaacgccggccttcttcggtcaggcgcatgctgcgggtggagcgggcgagcaagcggatgccgaggcgggtctcaaggcgcttgagcgcaatactcgccgctgctggcgtgaggcccaggccacgggcggcggccgtgaggctgccggtgtcggcgctgcgcacgaagacttcaaggtcgagaatcgagctcattgataaaaatcctttaaagatcttgtcgttttacccggatttttcatcgattaccaagctgggaagatgaacgctcactttctgacccaggtagttttctcatgacctcttctctgagcggtaaaaccatcatcgtcatcggcggcagcagcggtatcggcgcggcagtggcccaggcagccttggcacgcggcgcgcacgttgtcgtggccgggcgccgcttggcgtcaagctccgccaacggcctgcgcagtgagccggtggacgtcactgatagcgcctccttgcagcggctgttcgagaccgtagggcgctttgaccatctggtctacacctcgggcccttcggtgcaggccaaacccttgagtgaaaccaacctggatgaagctcaggacaacttcgatgtgaagctctggggctcactacgtgccattcagcaggcactgccctttttgcatgaacagggcagcatcagcctgacctcgggccaactggggcgcaagttggcggcagggcagttcatcaagacgggcattaacgccgcgaccgaggcattgggcaaacagttggccaaggaactggcaccgcgtcgggtcaatgtcatcagccccggggtaattgacacgccggcctatgcagggcttggagaagagcagcgtatggcgatgtttgccaaggcgggcggcgcattgccggttgggcgggtggggcaggctcaggaggtggcggcggggtatgtgttggcaatggaaaatggcttcttgactggcagcatcatcgacattgatggcgggggactgctgtaaacgccccgcccgcaaggtgattggctcagtgacggactctggtcagtcgaaacgtctcttcgacagtaaactcaggtccgtcattttttcgaaaggagcaggaaaactcccccgagccatgatcgtcggtgacttcttcgttcagtttcagcgtacccgcatgggctgtcaccccaccgtacgtgtctaggcgcataaactgaacccggacattgttgttgccggccaaaacatgggtcagtcctttcgtgtccttattgatcacgatggatagaatatttcgagttcgcgataggtcgtcatcgtaatggtcgccgataaacattcggtgatcagggcggtggccgccgaaatctgagctatcaattctgaattcggttgcgacaaactttggatccggtaatgggccaccctggaacaccgctttcagttcgcccgttgccgggtattgtgcagtcaggccagttgaaaggcctctcagttccgccgtgccgtcaaccagctctattttttggctgccaaattcggcgctcgccccaaaagaggcctttagattcgtaccgtcgaatgacacctctattttccctgcagtggcggcataggttggatttccctggttttcatacgtagagaaatgaagcctggttgcgccttctgcaaacgagtaggtgtgtttacttccgtccgtaggtaaatcggaaggaagcaaaatatcgatacctagaaaatcactcggtacgtccgataagcgctgggtcgcagccaaatgccataacccactcgtctcacggtatagctccatcttgtcggcgtcgccgatgaaaacgacgttatgttggcctgtcaccgtaacgttaaaagtaccttcagtagctgctgttttgcctttcatttcgatagccctccaagcgtgactgagccctcagcctaggcgcacggataaggtttggatactgttagaaattacaggctagaaaacgtttattgattactagagtcgctaggagcacctctcttactgatggtgcacccttctataggactctgttataagagaatcattttttatacctgtcaaagttgacagtgtcgcccgagccagcagggtactaacattcccacaaactcttttatcaacttatttattggcgaggctggttaacatgaaacagtcactgcatgtccctattttaccgttgtcgaaaggcactttcaccgccacattgaacggctacttggcgcttgattatgttggcgatcccacccaagaactacgtctggatcaagatgtgtggacactcatcagttacgggcgcccctcaaccggcggtagtttgattgtgttcaccgtcaacgtccctagcaacttgtgtgacgacggaaaacctcaaaccttcttgataggcagccataacaccgtcatttcgctctatacgcagcagcttaatttcgttgcccagacgggggagatcacggtatcgcttaaagataaccggatggcggcaacgttcaatttcaaagcacaagcaatcggtacctctcatgaaatcgaggtctccagtggcacgtttgaggtcagcaacgggactggctttatcaacgcggactttaggggtgaagcgcgtccgtatccgacatttgaagcaacaacggtcgagataaatcatctggacctgtttccgctgcccaaggatgccgattctataaaagggcgcattcataactatgaccccattccgactcaagacgatcttttgtctattgtggttaacaagggaacgccgccaggcacctatcagttggggggtgacgatccggcggtaatagtgttgttcacgcagttcgtaaaacgtgccttgttagaggcacgcagtggtcaggtggttttagagcatgtacctgaaacggggtatgccaaggggaacttcgagtgcgaattcaacgatgaactcaataagttttccgctgttggctccttcgatgtccatcattcgtagtcggctatgcctgcgcgcttgaccctttaggcgcccatccttggttatcaggatgagcgccttgccgattgcgggcgagggcaagccttatgaccgcaaaatagtcctcatgctttcaacgtacgcgtcatccgcaacgccagcacactcccacccacaatcaccgccgccagcaggtacaacgccatatccgtggacccggtggcatccttcacaaaacccacgatatacgggctgagaaaacccgccatctggcccatggagttgatcagcgccaagccacccgccgccgcgcccgcgctgagcatcgcggtgggcaccggccagaacatcggcaggccggtcagggcgcccatggtggcgatggtcaggccgagaatggcgatagcgggcgtagtggcgaagttaacggcgatcaccaggccaatggcgcccatcaacatcggtaccaccaaatgccagcggcgctccttgcgcaaatcggcggagcggcccaccagcagcatgaacaccgctgccaacagatacgggatcgcgctgagccagccaatcaccaggttgtcgctgaagcccatgttcttgatgatcgacggcagccagaagttgatcgcatacacgccactctggatgcagaagtagatcaggccgaatgcccagatcgccgggttcttgaacacttcggccagggagtcgctggtggttttcggcttgttcgccaggtcagtggcctggtcggcttccagcaccgcgcgctcatggggcttgagccatttggcattggcgaagctgtcactgagcaggaagtaggcgagggcgccgaggattacggtggggatgccttgcagcaagaacatccactgccagcctgccaggccaccttggccggcagcgaagtgattgagaatccagccggaaaacgggctgccgagcaaacctgaaaccgggatcgccgacatgaacagcgccatgatccgcccacggcggaaggtcggaaaccactgcgaaaggtacaacaccacaccggggaagaagccggcttcagcggcaccggtgagcaggcgcagggtgtagaaatgcgtgggcgtggttacaaacagcaggcatgtggagagcgtcccccacacgatcatcatcaacgcgatccagcgccgcgggccaaaccgggtcagcgccaggttgctcggtacgccgcacagcacatagccgataaagaaaatcccggccccgaggccgtacacggtttcactgaatttcaatgcatcgagcatctgcaacttggcaaagccaacatttacccggtcaaggtaattgaacaggtagcagataaagatgaaggggatcaggcgcagggtaacgcgcttgtagatggcgtttttatcgtcatcgctggccagtgcggcagtggcgctctgtgacatgggattctctctttattatgattttacgcggtgcgagggtaacgttgaccgccccaacagtctcgatgacgtgatgggcaactgtctttgtgctggcgcacagtcaagccatctttgcgctgtgccggtgaacaacctttttcaggaaattagccccatgttcgagctggatcatgccctggcgcaggagattgtcgatcgcaccatggcgatcctgccgtataacgtcaatgtcatggacagccagggcttgatcctgggcagcggtgaaccggagcggatcaatacccgtcacgaaggggcgcaactggtattggccaatgggcgggtggtggaaatcgacgggcagaccgccaagcatctcaagggcgtgcagccgggcattaacctgccgctgctgcatgatcaacgcctgatcggcgtgctgggtatcaccggcgagccggatgggctgcgcacctatgccgaactggtgcgcatgaccgctgaaatgctggtcagccaacgccaccagcaagccgagcaacaatggcggcgccagcgctgcgatgatctgctggccctgctgttggccgacagcggcgactccccacgtttggtggacgaagcccagcaactggggctcaagccacaactggcgcgcacgccgtacctgtttgaactgggccccggccaaacggcggaggctttgagcgcctggctcgccagccgttacccggacagttggtgcgtcagttctgcgcagttttccttgctgtggtgccgacccgccgcggtgcaggtcgataatccccgcttgttggaaaagctcgacggcctgggctggaacgtcctgcgcgtggccatcggcgggcaagcggaaggtttggcggggctgcgccgctgttaccgccgggtcggtgatctgctcgcttatggccgcgatatcctgccgcaatcacggctgttgaccctcaaccgttatcgcctgccggtgatgctgtggcgtcatcgcaacgacgacgccctggacgaactgctcaatccgttgcgcaaagtgttggccaaggacagcaacgggcaactgctcgccacgttgcgcagttggtgtgaacacgacgggcaaagccaggcgtgtgccgacgccttgggcattcaccgcaacagcctgcgctaccgcatggagcgaatcgctgaactcagcggcgtggacccgctgacgctcgatgggatgcttgccttgtacctgggcgtccaattgctgccccagagcgaacgctaaaattcgcacgatgttattagctgttctccctgtcacggcttacgtttttccaagctggcaatgaactcatcgaggatgcgcttgctttcggcagcttcttcggcactgggcccgcgaatgttggcccaggggtccggcttgggcgcgaccgagccgtagcggatgcgtacggatttgaggattgcgtcccacacggccatggcttcgtagtcggtgagggaagggttgacgggttctggtgacgcgggttgttgccagagaggcagttcgtagcctttgttggcgaattggggaagggtccagcgcactagatcttccggttcgttgggatcaactggctctcctttcatgccacccgccgacaaacggatgctcatgccaggccgagccagcgaaggattgtcccggtagttttcgctcacaaagagtatttgacggtgagtgtcatcgctgaagccgatcagggactcttcggcttgcatgccggccaacgtaattttccttgcccgcaaattttcgtaatcccctgcgagaaaaatttgcccgtctttgggggtgcgcacgtgcaagcgttcttcatcatcaggcgacaaagcgttgatatagatactcagcgagacatctgaggctggtgggctaaagtcgaaactagcgatctcctgatcgtgatgactgcgaatgacaatggagtccagtgcaaagcctgcgcctgcggtttcaggggtgactttgaagatctcttttgaaagttttaacagacgatcttcaacaggggcggtattaccattgaaggagtcagcgcggagcatgacgtaaacgtcaccaatcaacagatgggactcatgcacgaaccagtctgcaatttcaacgctctcgtagtactgcaataacctatgttgtgccgttacgactttcgccgataccagcatcgacacatcggaatgattgtagttttttacggaagcaatccgactcgctcgctcgtacacagccgcatcaaaccgctctcgcgtcactccctctcctaacacccgcacttcaacggatgcatgatcggcccccagcccgtagtacaacttcacatccccgccccccgtccagctggcgggcaaatctatcagcccacggcccagcgcccaggtgcgcatgttgctggtcaattcgtgcacggtttgtttctcctgttcactgggttgtttgaaggtggtgcaccctgcaaccgatccaagtagcaggcatgtaaaaaatacggtcagcctgcgcatagaggcctcttggctttcgccgcaatcttgatcagggagtagagggtgaattgctgagtgagcgggttggcgtaggacgcttcatgatcgaaccctggggcttgcacttgctggcggacagaaccctggcggatctgcctgatcggcgcgcggccggagctcaccggtacggtgccgtcgccagcgccgtcctgcatacggcaatgcagttcccaatagctggtctgtacggtctttactggcgcattggggtcaccgcgtgggggcattacactttcggcttgcccgcctacgtacagggggcttcgcccgtcgtcacgcacctcgggcatttgcaagctggacaccgtgaaggcgtcggggcttgatgcataggggccgttgaggcgagaccctcggcgcatctcccaggtgatggtttcgaagctgggatatttatcgtcgttgccatagtaaacataggtttgagggtggtatgaccctgcaatgcgttgatggaagctgctcgctttctttatgtttatcgcaaatgtctcccaagtgatcggatccccatccttcggtgccaaccactcttcacgcaacaatccccaccagcggtcacggcgtagataaatctcttcgtaaggatcctttaccggttgacgcggcatagccggggctccacgttcgtcaatcagccgcagccagcccggggcgtaatcctgggtgggcagcaattgcaaggcaccgggtgcctgcgcgaatacagcggtgacctcctgaccggtggggccaatgaccgcgccggcaatgggatcttcgtcgcgcatgccgaccttgcatcgacggtaagcgaccggcgccccgatggcgggcatcacgccgtgcacgacgccggcaattttgtcggccatacccggtagctgcccgcatcgacgtgccaccagcccgcccatggagtgggtaaccagaatcacctgttggcagttgcgaccgtactgctgcatgagttcatcaatacgcacagccagccttgaagcggcctcctcgttggagtccagccagttgtaaccacaggcatgcaccggcatacggtagccaccacgcgccgccaactcgtccgaaataatcgacggcaactgcgccgccaggttagcgcccaacccgggcatggcgatgggcatttcaggtttcaactcggtgacttgaactgggccgggctcgacactgcgggtgtgcagatgctcaggccgaatgtcgaattgcggccatttgtgcggcatgaattcgctgttaagggtgtcttcaagccacagaagaaacgcgtggtagctggtttcgctgacttcgccccatccgcgctcttcgtagcgcttggtcagagccaggatggtttttttcctgtccggttctggcggcactatgaccgtgccgacagagcgctccggcaccgcgcctttgttatcaacctctaccctggcggggtgcaacagttgctgtcgtatacccgcctttttgtttatccagttcagggccaaccacatattcttacccatgaaccccgcatccaaccgccagacgggagccgccttattctttccctttcctttctccggtttgctcttcaaattcgaccccataatccccggcacaaaaatcaccggcagcaccccgtccggcggcaatatgcagtgcaccgggtcggtgatatggctgggcgtgagggtccaggtatgcacagggttgccccgggcgttataagagagcggcgctatgcgtggcatttgagaggtatcggccatgaaattctccctgaatcgagggcgctgctgccgttcggcgtggagccccccggattgatattgtctggaatcttctgggccacactctattagcgtgcaattgcgagcctcaagggagcgtgcgcattaaagaggcgtcctacactgctgaaagtcgttgctgacagatagatcaaacaagccggcccgtaggtttggcgtttattcatcgcggcgtgtcactttgtaggaatgaacaacaaaaccccatccacacttgtgcatcggccccgcgtcattcccccagccaactggcagcatgggcgttataaaaaccggagaaagcccatgaaaatcgtgatcgcccccgactcgttcaaagacagcctgagtgccgcaggcgtcgcccaggcgattgccggtgggtgggcccaggtctggccggatgcgcacgtgcttcaatgcccgatggctgatggcggggaaggaacggtggatgcggtgctcgcggcgtgtaagggtgagctgcgcaggcaaacggtccgaggcccgctgggcgacagcgtcgaggcgcgttggggctggctggccgacagccataccgcaatgatcgagatggccgaggccagcggcttgcaactcgttgcgccggggcagcgcgacgcatgctccagtaccacctatggcaccggcgagttgatccgcgccgcgctggatgccggggcgctgcgcatcatcctggcgattggcggcagtgctaccaacgatggcggagcgggggcgatgcaggcccttggcgtgcagctcttggatagcgaacgccagccactgccggcgggtgggttggcgttggcacgtctggcccatatcagccttgaacaactcgacccgcgactggcgcaggtgcgttttgaaatcgccgccgacgtcaacaatcccctgtgcggccctcacggtgcctcgtcgatttttggcccgcaaaaaggcgcgaaccccgaacaagtggcacaactggacgctgcccttggccacttcgccgaccattgcgcccaggtgctgcgccgggatgtgcgcgacgaacccggtagcggcgccgccggtggtctgggctttgccgccaaggcgttcctcgctgcccagtttcgtccgggggttgaggtggtcgctgaattggttagcctggatgaagcggtgcgtggcgccgatctggtcatcaccggcgaaggccgtttcgacgcccagaccctacgtggcaaaaccccgtttggcgtggcgcgcattgcccagcgacatggcgtgccggtgatcgtgatcgcgggcaccttgggcgacggctacgagcagatgtacgctcatggtgtggacgcagcgttcgccttgccgtcggggccgatgtcacttgagcaggcctgccacgaggccccgcgtctgttacgcgagcgggcctcggacattgcgcgggtatggcgcctggcagctactcgctgaccccgtgcgccaatcgttccacccactgctcttgaaacccctgcagcgccgcacccggctgctgcaagtgcacaagctcaagcatcgggtcctgcaccgccgtgcgcacgccgctcaattcctccagggtcgccaagccgcagaacggcacataggcttcgctatagccaccctcgtgcaccagcaccaggcggccctggcacaaacgttcggcggccaggcgcagggcgcgggtcattaaccggaacgattcgctgtgcagcaacatgcgcgctagcgggtcgacggcgttagcgtcataaccgcaggcaacgatgatcaactccggttcgaagcgctcaagggcgggcagcacgatgcgctccatggcctgtaggtaggtggcgtgaccactgcctggcggcaacgggatattgatgttggcgcccaggccgacgccccggccgcgatcctgctcgccgctgtaaccgggcgggtagcagccgtcctggtgcagggaaatcgtcaacacatcggcccgttcttcgaagatcgactgcgtgccgttgccgtggtgcacatcccagtcgatcacggcgactttgcccagcccgtggcgcgccttggcggcctcgatggcaatggcgatattggcgagaaagcaaaagcccatggcgctgtctgccaggcagtgatgccccggtggccgcgacagcgaataggcgttgtgcgcctggcccttgagcaccgcgtccacggcggccagggtcaaacctgcggacagttgcgcgatctcatagctgccaggccctatgggtgcctgggggccaagctcaccgccgccggcatcgctcaaggctttgaaacgttgcaggtaagcacggctgtggacgcgcagcaggtcctcttcactggcgggcggcgcgctatgcaggtgcaggtggcggctgagtccggagacatccaacaggcttttcaagcgccgcttggtctccggtgactcggcatgcccgctgccggccggcggctgcacccagccgcccacgggcagggtcagcgcatgggcgccggcgctgtgccacaggctcatttcgtcgaaaaaaaatgcggtggttaggttcataccagttccaattcagtggaggagtggggacggctggcgacgatcatcaccagggacagcaaggtgatagcggctgcaccgagcagcaacaggctgaacccgccgctggcttcgatcaggcggccggcgagcgccgggccgatggccaggccgccaccgatgaccaagttggaggcgttcatcagcttgccgctgtgatcgaggtcggccaggcaggccaggatcagcggcaggatgaaggtccaggtaaatttgaacagcagcgcggccagggcgaatcgcagcaaggcgggctggccgagcaacaggagcaccgctgttgccattaacgtgtagcccagcaacaacagcgcaccacgcggcagacgagcgccgatcagtgaggcgctcgcagcgccagcaatacccattacggtggcgatggcgagaatctcgccgctgtgctgcgcagaaatcccggcactggcgcccaaggcaccgataaaggtccatacgccccccaggctgatgtaaaaggcgaggaccgcgccaacccccagggcggctttccagcgtgaaccgggcaagaccggggtgcggctggcgggcaacgcagggctaccggcaggaaaggcccgcgccaatggcagcagcagggtcatcaaccctgccaggatcaggtagcaggcattcaagccaaaccgttcgaacaaaccaggcagcaccaccaggccgacggcaccgacgatcaactgccccataacccacaaaccatagactcggctgggattggcggtggtggcggcactggccaggcagaggatcatcaacgaaccgccggccagggcgctggcaccgcgcaacaccagcagcacggcgtaggtgtcggcgagcattgacagcaggttagcggcaatgaacaacagcgcggcgacccgggcggcggtgcgccagtcaacccgcttgagccaccaccaggcgggcaaggttgccaggctcatcgcgccaagctccacggaaaacaagtcaccaatacgcgccgggctcagttgccactggctggctaactgcgcggccacggccggagcggtcatcaggatggtcggggtgatggcggcaaacagcacgatcgccgccagccgtgccgttgtcgcagcggtggaaatgggcattttcaagctccagggaaagggggtcagaacacatgcaccaggcgtaacaacgcctcggtgccggcgtagccattggaagccgcaacgttttgcgaaaggctgaccatcagttggttctgccggtcgagccaatgcccgaattcgaagccgacttgggtatagcgcttgtgggtgtcgtcgaggctgcggttgttcagacgcagggcgccaccgtcggcgtggatcaggcgcagtgcgccggaagtggcggcgctgaagtcataggaggcgaaggcctgcaggcgatacagcggggcttgctttagttcgctgccaaagtaatcgttgttgcggccatagagctgggcttccaggttggcttccagtacccatttttcgccgatgccgtgggtgtagttgtagacaaaggtggcgccccagcgattggcgccgggggacacgtccgggttttggctgtgatattcacccaccggcacggtgatcaggctcaacaagccgctgtaagtgcgcgaggccgggtcgttgacgaaaaacagcgtgccgcccacctgtgggtcgcccaggccgcgctcgcggctgcgctgattggcgccgggcaggcgtgcgttgatgtcggcaaagggcaggatgaattgtggcgtgcacaacgtgccgcaggcgtcggtgaaatacacctggcggtaagccacggcgttgacccgcaggtcggccttgccggtgctgtcggcggggccatggaaatccccggcgcgtgtggcgggcaggtacaacacacccaggctggtacccggtggggcggcgaaaaagtcgcgggcgttgaggtcggccgcctggctgtcgacgctgagcagggtggcgaacagcactgtcaggttacgtaagcatgtggaagtcatgaagaagcgtctcgtgtgagaaggccgaaaaaagggcaacagcagcccgtgaccgttgaaaaacgaccgtggtaaaccttgggagaaacgggcagggtcagtcgggcggggcgtgcaccaggtgcgctatgcgtgccttgtccttgacgccgagcttggtatagatggcgcgaatatggtggcgcacggtattgggcgagaggccaaggtcgcgggccacttccttgtaggtcttgccctcgccaaagccttgggcaacatcgttttcccgtgggctgagctggggcagggcgcggttgatgcgtgcggccaacagcaactggtcgcccactggggacgcctggatatggatatgcttgccgtcatggccgcgttcatccagaggcaccggcagggtggggccgcgccattgcggccattcgctgagcagcaggtcgacaaaccctcgctcggcacattgcaacactccccgtgggtcgcacaccgccagcgcgaggttgcgcgggctggtcagggtttcccgcatcgccaccaaggtgcggatctggtttgccgagactgctgccaccaggtgcagcatcaagttattaatcatctggcaatcctgcacgttgaacttgggtgcagcgggttggcggtagagtgtcaggtggtggctgaggtgggtttgcgggtcgatatggatcacacacagcagttcacccaagccgtggcgttgccccagccagttcaaggcgctgccgttggcggagtcgcgcatatcgatgatcaccgcctcgccgggcgacgcatgcacccgcgcaacggtgacgtccagatggcggatcgactgccagtccgccagatagtcggggggcaactggtagaggtagctgttgtgctcgtgcggcaaaccgttgataaccgccgagcgcccccaccaggcgctgtcgaaggccagcaattggctaaggcgcgccagggcatggtgttgaaagtgttcgatgtcctggtgttgggccaggcgttgcaggtccagggtcagagtgctgaaagcctgtaacaggctcgcgggatcgagacggttcatgggtgttcctctgtgggactttttttgttgttctcgtcacagggtgaaggccaaagcgtcgggttgacggggcagggcctgggctgagtatcggcgttgcgcgcaaggatcgctatcgttcagatgcaggatggtgctggttggccggtgggaaaactccggctcgtcaggtgggcgacttagcctctacactggccggccacctgtctttcataggatgaaatgcaatgcacgtgcctgaaccgtctatcgtgattcagggggtatgggcgtggcgcccgcgtggcagggaaagggcgtcggttcgcggctgttggcggccgcgctggaggtggccgacaactggatgaacctgcgccgtgtggaactgacggtctacgccgacaacgaagctgcgcacaacctgtaccgcaagttcggcttcgaagtggaagggcgattacgtgactatgccctgcgtgatggcgtgtttgtcgacaccttcagcatggcgcgcctgcgcacatcggcttgatcctgtaagcatagggctctatacaacttcgatgaaagcggtgtgtcagctactgagtctttgcctgaaccaccgccttcgcaggcaagccagctcccacactggtcatgcattgcccacaaaatcggcgtttggcacagattccctgtgggagcgggcttgcccgcgatggcgttgtgtcagccactgagtcttcaactgaaccaccgctatcgcaggcaagccagctcccacactggtcatgcattgcccacaaaatcggcgcccgacacagatcccctgtgggagcgggcttgctcgcgaagaaggcctgacagccaaccaggatattgggttcaggtagcggctaaaaaagttgtggcgatacctgtgccctgtaaggcaaacccgaccgcggcctgcgcatgcagcgcggtggtgtccagcagtggcagggcgctgtgttcgggctggatcagcaggcaaatttccgtgcagccgagaataatcgcctgagcaccgcgtgccgcgagtgtctggatcacccgctgatacacctggcgcgaggcgtcactgatgacgcccacgcacaactcttcatagatgattcggtgcaccgccttgcgttcatccgcgtctggcaccagcacggtgagcccctgggcggcgaggcgcgatttaaggaaatcctgctccatggtgaacgcggtacccagcaagcctaccgtcaaggtcccagcctccagagccgccgtcgccgtggcatcagcaatatgcaggaagggaatcgacaccgccgcctcaatgcgaggtgccactaaatgcatggtgttggtacacagcaccacacaatcagcccccccggcctgcaagcgtcgcgcggcatcttccaagatcagcgcggcatcgtcccaacgcgcggcatgctgggcctgttccaccgggccgaaatccacgctgtacatcaacacttgcgccgaccgcagcgggccgagctgatcgcgcacgcgctggttgatgagacggtaatactcggcgctggactcccagctcatgccgccgataaggccgatggtgcgcatgtgatgctccggacaaaaagtgtggcttcaccttacccattcaaggcggatgagtcatacgcagttgccagccaattcaccggagcagttcaaatctgagtgatgccccatgttaaataaggtgcaatgtcctaacattggctatacctaccactcgttctcacgatgatggtcgccagggagttcactaatgaagctaaggctaatgatcggcacactatgcgtcgcctcgctcggtatggccggttgcgccagcaaggtggtgcagccggatgagtattcagggtttctttccaactacagccaactcaaggaagccaagtcaccgtcgggggccgaggtgatgcgctgggtcgatccacagctggacctgagccgctacacggcggtgtacatcgagcccacccagttctaccccaagccccaggccacctcccggattcccgagagtacgctgcgcggcatcaacgactattacaaccaggcgctcaagcgcgagctggcccagtcactgcccgtggccaatgccccaggccctggagtgatcgtggtaagagcggcgattaccgcggtgagcagcaagaccgaaagcctcaagccttatgaatttattcccgtcgccctggtggccgcggcagtgagcaccggcaccggcattcgcgatcaggaaaccaccctgggcaccgaggcgcagtttctcgatggcagcactcataaagtgctggcccaagtggtgcgcaaaggcaccggcaagccgctggccaatgattctcaggtcatgaaggccgacgatgtgaaaagcgtcattgacggttgggcgtcggacctgcaccagtcttacgtgaaactgaaaaaacactgagtcaaaaaaagcgcggcgggtaatcacccgccgcgctttttttattcgccgaaattatttaagcggcgtcaacgctggcagcttccactggccgctagcgacttcaggcttgggcaggtaaatgcgcaataccgcgtagaacgggccgggcggggctggcaaccagttgctctgctcagccttgggcggttcgtggtgttgcaatgccagggtcaggccaccgtcggcgtcgagcttgaggctcggcaacatctgcgagttgatcaggtagcgcttcttgtggtttggcaccagcagtctggtcttggcgtcgtacatcgtcagcgaccagaacgcatcagccggcggcaactggtccttggcaaaatgcacggtgtagctgtggcgtgcaccattggccggcttgccctcgctgtcggtgacgtagctcaagtgcgcggcttcatcactggagttgccgaacatccccagctcggcaccggcgtagcggtacaggtagttgttttgcaggtggtcgcggctgccgtacaggtctgcgctggtcacttggtgggtgtcgaccttggccttcttgaacgcggcgaattcggcgcggccatcggtgatgccgtcttccagggccttgcgctgctcggcggtcaactggttcaccttgaacggcgcgcctggggcgataccgatcttggcaaagcgcgccagcaggtctctttcgctgtcctgtggcgcggcgaaggccagcatgaagttcaggtagcgaaacagctgcgggccttcggtcatggttgccattggcttgggccattggatcttcggcacgttggggggggccggttgtttcacatagctgctcagcgcctgcaccttgtagccgttctggatctgcttgaccttgcccaggtctttgtcatcaaacagctgcgtgcggtacagagcgtaggcgatgttgctttcgctgtagatcacacggtcgatgtccaccggctgctgacctttccagtctggcccggcaatcatgtagtggccgccgttattgccagtactgcgggtgcccaggtaggcgaaattctgcgtatagaggtcgatcaactgcaccgagtagtagcggttgtcttcgaccttgggcagcgtcagcaccagcggttctttacgcaggtccatccacacgaacgagtagggcgtgtcgacgttaggggtagtaactgcattgtccttgtgagtgagcacctgggcgctgttgtcgatatggttgaacggcgccttgaagtgggcgccgcctttatcaacggcctgggtgtagagcgtcttgtacatctgcaccacggggaagccgtacaggtaggcttccttggcgatggcccgggcttcgctggggcttgcggtgaagtcagcccaggcgccggagctcatgaaaatcgagaggctcgccaacagcaggcgcgtcggttttccaatcatgttgttgcgtccttcctgagtgctatctgagagcgtggcgtgaaggcgctgagtttcctgttttattgggcggacgtcacgttaatctctgcaaaggacgatagggaaggggcgttagagcatggatttgactttgtcacgcaattgatcaatcgagaacggcttggcaatcacctgcatgccggcaggcacgtcaatgttttcggcatagccgctagcaaacagaatcggcagggtagcgcgcagttcgcgcactttggttgccagttgtttgccgtccatatcgggcaggccgacgtcggtcatcatcaggtcgatgacctgggcggtatcttgcaccaccgtcaatgcttccccagcatcagcggcttcgagcacctggaactccaactcttcgaggacatcgacgatcagcatgcgcacgatagcgtcgtcttcgactacaaggatggtggaggcggcgggcataagggatattcctgaaaaatggagagcgtacggagctatgggattgactgactgcttactagtgagtgttgcgcttcctggcaagttcccacaaaaggtgcctattgtgatcattgtgcgggataaagtctcacgcgcgggcgaaaccctatgagcgtttgctgaaacacaagcgcgccaacattcattggcgcgctatgatgcctttacagtgcggcgtccaacaactctttgtaaacgtcgttcaccgtgtccatatcgctggcggcaaattcactggtttcaaagaatttatcgcccttatccgtgacgtacgggttcatattctttccatgtcggccactgttgagcactttttccatgccctcctgcattgcctgcaaggttgtgaatttgaccagcgcgccatcggggtcgtagaaaaaccagcttgtgctgctaccttcgacctttatcccagctaccattgcatggtccgcagttacgattcttatggttttcgaggtgggggagttggtcagttcgtcgatgatctccaagtgattttgctgcttgaaagatttacccatgtgaacagccgaccggtccccaacgatcatctggaagttatgcagctcctggataaattcagccgcttgtatgtcccccggattcatcgctgcgcgtttgatattttttatcagctcgtcttctttaccgagcatgatcgccaaggccatgaggttggaaaaacctgcgcaatggcccgtagatgttatgtcagtacgcgccagataatcgatctgcgacacatcggtgaaaatcacactaggagcactcacatcatgttttaggttcgatacgaccagtttggcctcctcgattctcagcgctttgatttccctcaccagcgtgcccatttgttcaggggccaagtgattatttaacgcaatattgactaaatcttcggaagacatatggacatgaaagcctggcaggtcaaaaggagagccttgagttagacctcgttgataagcggcagcattcgttggcgattgggagaggttcagaagatgccgaaaagcagcgttattagagcctgtggcgcggactatcattgacgacgcgcccacgcgcgaaaaatttttgatcggcgccccaaatacgttcttcttgatcgggtcatagtgataccaccgattatttttgaatacggcgaccgtctgcaagctgacgtttccagagggataagtaccaatcactgcggtcccgtgtcccttgcccgctgccttgagcacatcgtaactgccggtagcaccgcgaattgcattcgccgccttggtggctttgtttcgaagaaactgaaggcccttaccagccagccgcgcccccccgatagccgcatcacccaacccacccaacgggttaagtgcgctgaaagtcgccatgccgatgaccttggccgcgcgcgcccctttgctgacggcggaggccgtggtgccggcaatcttgatcattttcccggcagtggacatccctgcggtcacgaacccgaacaggtccatgtccaagtgactcagaccctcgaagactttgcccttgcgaaaacaattgatagccgaataaaacggcaccagttctaaaatgaagttgctgatcgcattggcccgtttctcattcttatcgtggtaagtgaggccccgtgcctgctccaggatggcctcatcatcaaaattggtatgttccacaaacgcatctgcgatgagttgactacgagcgccattgaagctgtcaggtacggctttgtccgtcgggggctgttccttgcgaagcgagctgccaccttttgaaggactgaaggctatggtttcgcattttacgttgccatttcttgtcgtcttgggctctgctctattggggagaaagcttcgaatcgacccctctttgaagctgatttcataatcagtcgccttgccaccgcgttctacgcgtactaacaacggttcttctttggggtgaagcgtgttaccccagatcggaatgagttctgtgctcagggtcgtggattgattataaaaaaatgaaagtttgcctaattcgaaattctttctatcttccagcggcagttgggagatcaagtgccttatggcagtgttcatcgcgactttcttttcattgatggcggccttgaattcctggttgaacgactcaagcacgccaaacgtggagatggcattcaacttatccaaaggaatacgcgaatcactgctgctgtagcgaaccggccctttcaagtccatcatcacgatgtccctgagcgagtgcggcccgaccgggccgggttcatagaagacatctccccagggcctgcgcttctgatacgacacgtgaatcaatcttttatcgtagagcgcttccaggccgggaaagcgctctttgagtacggtgtcggctttcagcgcacgggagggcagttctttttcaaaaacttgagtcgccgaggtcatcgacgccgtgcgcgcctcgaattcactcagcagggcagccagttcttcagcgctgtagaggtgatcggcttttttgactagtacgccctgcacaacgccccagtcgatcagggcttcacgttgcgcatcgtgagtgactgagcggtcggccaggccggcgctctcggcctcgagcatgacttctgcgaaggtcatgctcgcgacccggccgggagtctgggcttcaattgtcgttgcggcaacggccaggttgacccacgccgggcttccataggtcacggttgaggggatgtccttgatcaggaataccggtgcgcgggatgccagcaataaataagcggcgacgccggccagatcggggctggtcttgccgttggctaccaaatgtttgcccaacgcttgcaccaccttgtcagcggtttggttccagtgatcttcgtgggccagatcgaagccggctgtcaggttgcgattggcctcagtgatggactcggggtccagttgcagggtcatggcagccaggaggtggtccatggcgctgctatccgtggcgacgtgctgcataccttcctgcaggctcttgcccagttgctgcgccgcgggggaactcaccagtgcgttcagggttttgaccggatcgcccaagacgtcgggcgccagggtggtttgctcgcgtaaatacgccagcaacgaaccaggggtttgcttgacggttggctgatccggcgcggtggcgtaattgagagccaggttgtgcaagcgctgctggtcatcggcactcatcggcacgggccagcccaatgcgccctccaggttgcccagcggatggatttgcgcacggtcgagcaccgccaccgagaggccagatatgccgaagtgactgttgggtagcggcagccccaggctttttataaaagattcaagcgtggtgcgagcccccatcacggcgcgagccgctgagtccggatgaacctccatcgaggtgctttgagcgctgccaatacgtcatgggcgggcgcgtccttgcccaagcgctcggcgatcccgaccaaggcatcgccgagcgtgttcaaattctgacggttgcccagttgctcgttgagatcaaggttgctgacgtcgggagtgcccgggacttcgggagattgtgggggcgtgagcggcgtgtgtgggagtttgatgatggggggtggcttgggtaaatgtgcaaggatatcaggctggaaactgtgcaatatcttcgtcatacaaagtacctggttcgcaaaggaatttatgtgtgcctgcgaccgctccgtggtccaaacacgtatcgatgtgtgggaagaggttctggcgaggttccgaacccaactcgtaacactgtatgagactcaccttcgacgcccgggcccgacaggcaggcgaaccgacccagggccgcctggacgcgcgtgtttagaagggggagcgtctgactacgcacaacgcgacgacgcccccgatttgcgatggtgagatctgtttcaagatagtgaggggctgccaaactccgtccagagtcagcgcgacaggcccaagcggtcggaaggttttgcttgccaatcaacgcacaaacatagcttttagcccggttattcgggcaaacttgcggtttttccgcatttggccaaggcatgcccatgacacccgcgtcgtccgtcgatgaaaaaagcttccgtaccctgctgagccgaaacgtcgccttgcccttgggcgtgggcgtgctcagcgcggtgtttttcgtctgcctgattacctatttgctttcggttatccagtgggtggagcacaccgaccgcgtcattaacaacctcaatgagacgtccaaactgacggttgacctggaaacaggtatgcgcggcttcctgatcaccggtgacgagcatttccttgacccgtacgaagtggccaagccgcggatcattgcagacctgcgcaatctgcaagacctggtagccgacaacccgcagcaggtcgaccgactcaagcgcttggaaaccttgcaaaccgaatggaacaactacgcgcagtcgatgattgagctgcagcgcaacagcggcgattaccgaggcgctgtcaaggcgggccggggcaagcggctcactgatgaaattcgcaaggaatacgaagacgcggtggcgatggagcagcagttccgtatcacccgtaacgcagaggtcacccgcacgacggtgatcagtgtcacgctgtacttggtgtttgtactggggttgagtggttttctggcctacatcggcaggaagaatttaatttcactttcaaagagttacagtgcaaacctcgcgtcacagcagaagattgcaaggcgccttgagcaaaccgcttggctgcgcaatggccagaccgaactggccgagcaagtgctgggccaactgaccctgaacatgctggggcgtaatatcctgcagttctttgcccagtacatgggctcggccgtcgcggcgctgtacgtgcgcgaagaacacggcggcctcaagcgcgtggccacctatggcttctcccgcgagcaggaacaacaggaacagtcgatctacagcgacgaaggcattgtcgggcaggccgcccagcgcgatcgcctgattcgcctggacgatgtgccggtggattacttcaaggtcagctcgggactgggcgagggcgccacccgcagcgtattggtggtacccaccagcgatgacgaccgcgtcaacggcgtggtcgagctgggtttcctgcgcccgctggatgagcgtgatgttgaactgctggaactgatcgccggcaatatcggcacctccatcgaagccgcgcgctatcgccagcgcttgcaggaagtgctggccgagacccagcagctcaacgaagaactgcaagtgcagcaggaagaactcaagaccgccaacgaagagttggaagagcagtcgcgcatcctcaaggaatcccaggcccacctggaaacccagcaggctgagctggagcagaccaacgagcaactggccgaacagacccagaccctggccgaacagcgcgacgccatggaccgcaagaacatcgagctgaaccaggcccaactggagttggaagaccgcgccgatgagctgcagcgttccagcaagtacaagtccgaattcctcgccaacatgtcccacgagctgcgcacaccgctgaacagctcgctgatcctggccaaactgctggcggataacccccaggaaaacctcagtgccgagcaagtcaagtttgccgagtcgatctattcagccggcaatgacttgctcaacctgatcaacgacatcctggatatttccaaggtcgaagccggcaagttggaagtgcgcccggaaaatgccagtgtcgagcgcctggtggatggcctgcgcggcatgttcgagccgctggcaatggaccgcaaactgggcttccaggtggacgtgcagcaaggctcgccaaccctgctgtttaccgatcgccagcgtctggagcagattctcaagaacctgttgtccaacgccatcaagttcactgaacagggcgaggtcagcctgtcggtgtcgcgcgcgccgggggagggcattgcctttacggtgcgcgattccggcattggtatcgccccggatcaacaagaaagcatcttcgaagccttccgccaggccgatggcaccaccaatcgccgttacggcggtacgggcctgggcttgtcgatctcccgtgacctggccaccttgctgggcggctatatcagcgtgaccagcgagccgggcaaaggcagtattttcacgctggtgttgccggaacaatatgttgaacgcgacgaggacgcggcgcccatcgaggccccgcgccaagtggtggtcgcgccagcgcccgcgcccgtcaaggtgtcgccgctgccggtggccgacgccaagctgatcccacgctttgccgacgaccgcgaaaaggcgccgttcagcacccgttgcatcctggtggtggaagacgagccgaattttgcgcgcattctgttcgacctcgcccacgagctgggttaccactgcctggtcgcccacggtgccgacgagggctacagccttgccgagcagtacatccccgacgccatcctgctggacatgcgcttgcccgaccattcagggctgaccgtgctgcagcgcctcaaggaacacgccaacacgcgccacatcccggtgcacgtgatttccgtggaagaccgcgtcgaagccgccatgcacatgggcgccatcggttatgcagtcaagcccaccacccgcgaagagctcaaggacgtgttcgctcgcctggaagccaagttgacccagaaggtcaagcgcatcctgctggtggaagacgatgacctgcagcgcgacagtattgcccgcctgatcggcgacgatgacatcgagatcaccgccgtaggctttgcccaggaggccctcgacctgctgcgcaccactatctacgactgcatgatcatcgacctcaagctgccggacatgctcggcaacgagctgctcaagcgcatggccaccgaggatatctgctcgttcccgccggtgatcgtctataccgggcgcaacctgacccgggacgaagaggccgaactgcgcaagtattcacgctcgatcatcatcaagggcgcgcgctcgcccgagcgcctgctggatgaagtcacgctatttctgcacaaagtcgaatcgcagttgtcccatgaccgtcagaagatgctcaagaccgcccgcagccgcgacaaggtctttgaagggcgcaaaatcctattggtggacgacgatgtacgcaatatcttcgctctgaccagcgccctggagcacaaaggcgccgtggtggtgatcgggcgtaacggccaggaagccatcgacagactcaatgaagtggacgatatcgacctggtgctgatggacgtaatgatgccggagatggacggttacgaagccaccgctttgatccgccaggacccacgctggaaaaaactgccaatcattgccgtgacggccaaggccatgaaggacgatcaggaacgttgcctggcagcaggctcaaacgattacctggccaagccgattgacctggaccgcctgttctcactgattcgcgtatggctaccgaagatggaacgcatttaagtggagcagtgtttcttggataccagcagcgatattgagctgcgcctgttgatcgaggcgatttacctcaagtacagctatgactttcgtgattactcgggcgcgtcggtcaaacgccgtgtggcccatgccttgcgtcagttcgactgcgcgaccatctccgcactgcaagagcgcgtgttgcacgacccggccgcgttcatgcagttgctgcagttcttgaccatcccggtgagcgaaatgtttcgcgacccgtcgcacttcctggcgattcgccaggaagtggtgccgttgctcaagacctacccgtcgatcaagatctggatcgctggctgcagcacgggtgaggaggtgtattccatggccatcttgctgcgtgaagagggcctgctggaacgcaccatcatctacgccaccgacatcaacccggcgtcgctggaaaaagccaagcagggcatcttttccctggagaacgtgcgcgcttataccgccaattatcaacaggccggcgggcaacgttcatttgccgactactacacagcggcttacgattacgcgatcttcgacaagacactgcgcgagaacgtgacctttgccgaccacagcttggcgaccgacagcgtgttctcagaaactcaattaatttcgtgtcgtaacgtattgatttatttcaataaaaaattgcaagatcgagcttttggtttgtttcatgagtcgctgtgtcatcgcggctttttggtcctgggcagcaaggaaaccctggatttttctgcctacagcaagcaattcgagcccttggtcaaacaagaacggatctaccgaaaatcatgagtgacgcgcaggacaccccgatttcggggatcgaagccatcgtcgtcggcgcttccgccggcggcgttgaggcgttgctgagtatttttggccaattgccgagcaccttcggcctgccgatcattgccgtgctgcacctgccggatgagcgccgcagccaactggcggaagtctttgcgcggcgcctgaacatcccggtcaaggaggcccgggacaaagaagccgtagaggcgggcacgttgtactttgccgggcctggttatcacctttcggtcgagcaggaccgcagcctgtcactgagccaggaagaccgggtgcaccattcccggcccgccatcgactacctgttctcctcggcggccgatgtgtatgggcgccgcctgctcgccattttattgaccggtgccaaccaggacggcgcaagcggcctggcccacgtcaagcaatcgggtggcactaccatcgtgcaggacccacaagaggcacgtattgccgtcatgcccctggcggccctggccttgcacacacctgaccatattctttccttgagccgaatcggctcattgctggcttccctggaacccttcccatgttaagtactgtccaggccaaactgctgatcgtcgacgatctgccagaaaacctgctggccctcgaggcgctgatcaagcgtgaggatcgccaggtcttcaaggcattgagtgccgacgaggcgttgtccctgttgctggaacatgaattcgccatggcgatccttgacgtgcagatgcccggcatgaacggtttcgagctggccgaactgatgcgcggcaccgaaaagaccaagaacatccctatcgtgttcgtcagcgccgctggccgcgaactcaactacgccttcaagggctatgaaagcggtgcggtggatttcctgcacaagcccctggatatccacgcggtcaagagcaaggtcaatgtgttcgttgacctgtaccgccaaagcaaggcgatgaaactgcaagtcgaggaactggagcgcagccgccgcgagcaggagctgttgcttacgcgcctgcaagccacccaggctgagctggagcaggcggtgcgcatgcgtgacgacttcatgtcgatcgtcgcccacgaagtgcgcacgcccctcaacgggctgatcctggagacccaactgcgcaagatgcacctggcccgggacaacgcggccgcgtttaccctggacaagatgcacgccatggttgaccgcgatgagcgccagatccagagcctgatccgcctgatcgaggacatgctcgatgtgtcgcgcattcgtaccggcaagctgtcgattcgtccggcacccgttgacttggcgcaactggtacgcaacctggtggataacttcgcgccgcaagtggcagccgccgaatcctccatgcaattgcaggccgaaagcccggtggagggtaattgggacgagtttcgcatcgagcaggtgatcaccaacctgctgactaacgcactgcgttatggcgctaagagcccggtgcaggtgcgggtgtatgccgaacatggcgaagcgcgagtagaggtgcgcgaccatggcattggtatcagcgaggagaaccagaagcgcattttccagcagttcgagcgggtttcggccaatcattccgcagccggcctgggcctgggtttgtttatttccgagcagatcgtggcggcccatggcggcaccattgaggtcgagagccagataggcgagggcgccttgtttcgcgtgtgcctgccccttgaggcggccgagtgaattcaatcgtcacttcgacgcaacctctgcgtgaccccatggtcgtaactgcagcaattgaccggacaaaggcttcccatgagtgaagatgcacaagatgtcgtactgatcgtcgaggacgacgaatccattatgtttgtgctgggtgagtacctggcgggcctgggctaccgggtcttgaaggcggtcgacggagagcaggccttcgaaatccttgcgaccaagccgcatctggacttgatggtcaccgattatcgcctgccgggtgggatctccggcgtgcagattgctgagcctgcaatcaagttgcgtccggaactgaaagtgatctttatcagcggttacccgcaggagattcttgactgcaacagcccgatcacgcgcaatgcgccgattttggccaagccgtttgatctggatacgctgcaggagcatatccagaggttattggcgtaataaacagggttcttctcgaacgccgagaagaaccttttaatgcagggcgtttcttttcagcttgttgccgcctttatgccgaaggcacgaaatcctttaaaggcaggccatagggctgtttgctgacaggatcaagtgcataccatttgccatttttctgggtggccgcaatcttagtcatgctgccctgcatcgtggcgctgcccacggtggcattctcaacgttcctgaatatctttacggggtcatagttgatttttatccggggttggttatttccctcggggctgcgattggccaagtagctgataccttcctgcaccccggccagtagcaggccctgggcatctatggggttgagcgcgcctattgcgccacgcaacagctttttcgcggtgctccccagcgtagatgtggccgtcctgacgccagcgcccgcggcccgtgcggccccaccggcgccggccaggataaaaccgaacgcatcgaacgccaaatcgatgaggccttctcgccagttgcccttgataaagttagtgatggcgttgtaaccgggaatcagacccaacacgaaatcttctaatttttgataaaaaggtacttcaccatcgaacgtggtagtaccccgcaactcgtctgcgtaaccgcggatgttaatttttttcaccatggcatcagcaatgtactgtgtcttttcgctggagaaactgttgggcgcgtcgtgggtgctgttatcaggccagggcgagaggacattttctttgtagtcgccatcagggacgagggggacgagatgctttgcattccttttatcgtcgggaatggggcctggacgtgtgtcatccagatcggggcgttttcgaatagtgttcttggcgctgtctatctcatacgtgtgggtgcgtttattgccgcgtgcatccacaacttcgctttgcacaaatacactggtggtggaagagtctttttgttcttggatttgagagtaaggagtgtacgttacatcaacttccttagaaaccgagattttcccatgttcaatgattttccgatcttcaagtggcagctttgaaatcaaatgcttgacttgcgattgcgtgccttgttcaaagccatcgagatatactctcagcccgccttcaaaatgagagttcacaaaatttttttcgaatttcggagcggtaatggtgctgaggtcgatatttttatcgctggaagtataggtatgcaaatccacttccttgtggagttgcgcggtgtggatgaatacatccagcagtgagtaggggcctggaaatgagaaaaaggtggattcctttggcgtcagcactttttgtttgatttgctcctccgacaaatgcgggttcagctcttttatgtaggccatggtcatgtcatgaagattagggggcatcttcgcaaacgcattggaagcctcattcaagcgatccacctggtctttgaatgcagcacgcaccttcgccatatcttcttctgagtagctatctgtgctgttccaatccagcacgccgttctgaacaccccagtctttcaatgcgtcgctttgagcctgctgctcaaccagtttgtctgccaacgttatcggcgccagctcatttcgcatcatgacctgcgcatacgtcattttgttggtcgagccaggggcctcggcttcgagacgggcgacggcggtcgtaaaactgacccaggagtgggtgccctttaccaatgtgtcaggtatctccttgactagaagctccggtgccttgcgcgataacaggatttccatggcaagctccaggttttccactgaagcgattttgttgacgagtaagtgatgagccagctctttgtgtatttcggcgatgttcttgcctgagaggttaacgtgggccaggtcgaaccctgcaactttggtccggctcgagtctggcgcagtcgtgttgacgccaagggcatccatcgacgtgtagagggctgtcaacacccattcggcgatgacgtcgggcgatgcaatttcgccaaattcgcgttcggccgcccgggcgaagatttcagcattgggtgacttgaggatgcggtcgatggcactgctacgatcgttcgagacgtcatctcccagatcaagaccgcgtgtcagatagtcgagcaagttgcgttctggttggccttccaaaaacttatttgtcatggagatgagtgcgcgctgatcagcattactcattggcgttggccatgaaagcgcaccccctagattgccatgcatcggtgtttcaattggtggacttgccaacgactgcgcaatgctctttaactcagtctcattagctggaagtgaaatgccgcttcctacgaggtagtcgcgcagcgtcacggccacgcccggtttcagattgcggttcttgaagtaggatgacgcgggatctatctggatgggcgtatccagaatagcgttaatcctttgcttaataattagattgtattctgcgtggtctttttcattggcgagcgaacttttggagtcgtggtcttccagcccctcaacgacactgtctgcaacctttgttattgccgcaatcacagaactccggttattcagatcgcccagttgcgaggcttgactctccagatgtttctgggagggcgtttcgacattttcagggaacaggtcatctttatgctcccatttgttgatgtactgcgtgatggctgcctgttgctctgcaggcgaaagagtgctgtcaaaaggcagggtatgaccatgaaactgggcgatctcagcgaccttcgcactggttgcggtggtcgcggggtcaaactttatgacgttgccggagcctgccaacgtgttggcagcgctcttgagcagcggccaacccataaagctgtgaatatcggcggatccggcggagggcttgggcggcgaaaagtcgaagggatttcggggcttggtacccatagtggtgaagccgatggtaccgctggcgagattaatagtgatctcttttgagagatcgacgtcattctctttggcccagttttggaacgccgggcttttaaggatgctatccaacagcgcacgcgactgcccgaaggatgaatggggcgggatacgttcaacagtggcctgtcgatagtcttgattgccggccgacaattccttcaagtcctgggtgtagaactcaagtaactttcgatcccccctttgctggaggcttcctccccgtcccgcaagctctgtggcgatctcgaggtgggcaggtgacggtgttggatcggcttttgccagttgagggctatgcaaatccgacacgcgtgagttggaaatagcagtcatcagaaatattcctaatcgatgtgggcaacatgttgttcgcccacatatgtggaaaaacaaccacaacgattccatctatttcctgctcaaccgtaacgccgaattacgtagcgcggccgccctatgccttgatcatctcccggaccgtggcggtcaataaatcgaaagtaaacggcttagtgatcagttgcatgccagggtcgagaaaaccaccgcgcaccgctgcgtgctcggcatagcctgtaatgaacaacaccttgagttcaggacgaatctgcctgcctatttctgccagctgccgaccattcatacccggtaagcccacatcgctgatcatcaagtcaatacgctgttcggactcaatgattggcaccgccgtgttcgcgtccccagcctcgataaacccataccccagctctttgagcacggcgctgaccagcacccttaccgcagggtcatcctcgacgatcaacaccgtttctcctgcattggcaaacggcagcaatgtggggttgagcggcgcctgggtttggggctcgccgataaaacgtggcaggaacaggctgaccgtggtgcctttgttgacttcactgtgaatcgtcacatgcccacgagactggcgagcgaagccgtagatcattgacagccccagccctgtgccctgcccgatgggtttggtggtgaaaaacggatcgaatacgcggcccatcaggtgttggggaatgccgcaaccgttgtcactgacactcagctctacgtaatcgcccggtatcagggtgccgtaggcggcggtgaagacgctgtcgaggtggcggttggtggtttccactctgagcgtgccaccggtgggcatggcatcgcgcgcgttgatcaccaggttgagcagggcgctttcgagctggttggggtcggcttcggccgtccataaagcgtcgctcaagcgcatgtccaagctgatgctttcgttgatgctgcgttgcaacaattcgcccatggccgtgaccaactggttgatctgcacgggtttggagtccagcgattgtcgacgggagaacgccaacagtcggtgggtgaggctggccgcgcggttggcggaggtcacgcccaggtcgatcaggccgtccaggtcatccagtttgcctcgcgccacacgtcggcgcagcagttccaggctgccgataatgccggtaagcatattgttgaagtcatgggcgataccgccggtcaactggccgacggcttccattttttgcgactggcgcagggcttcttcgttgtgacgcaattgggcggtgcgttcttccacttgctgctcgagggtttccagggtgcgctgcagccgcagctcactctcgctcaagtcaatcaaccggtcccgcgcctcgtattggcgccgccgaccgcgcagggcggcgctgaccaggctgatcagggtgatgggatggaatggccgctccagaaacgtgacgttacccagcaagccgctcaggcgggtcgagccgttctgctctttgccgccatgctgggtcatcagcacgatcggcaggtcggaccaggccggctgctgatgcaacagctcaagtaacggctcaaggtcgacgccacgcagggcctcagccgcaatgatgagcaggccggcgccttgcgtcagctcttcgcacagcgcggtcaggctattggcgacgatcccgctatagccggcttcattaagcatcatcaacgccaatgagccatcgcggcccatgggcgccagcacgatggcgcgctcggagacgggagaaagggccggcactagccctcatccttgagcaggggggaaccggcgcccatataggtcggaatgccgcgcagcacaccctggaagttatccagaggcacacccaccgtcatgccgcggctgccgatgcggtattcgcgaatggtggactcatgggagccggttcttttcttgatgatcgaaatggcccggcgaactttgcccagagcctcgaaataacgcagcaggatcacggtgtcagccaggtaggtgatgtcgactggcgtctgcatgtcgccgaccaggccgtgctgggccaccgtcatgaaggtggccgcaccacggcggttgaggtacaacagcagctcatgcatatgcaggatcagcgcgttctcttcgggcatggcggcctggtagccgttgatgctgtcgatgactacggtcttgatgccgcgctcatccacgcagcggcgaacccggtgcgaaaattcgccgggggagagttcggcggcgtcgacctgctcgatcagcaggttgccggtgtcccgtaaggcagcgaggtcgatgcccatgtttttcatgcgctcgaacagcaggcccagctcttcatcgaagatgaacagcgcagccttttcgccacgggccacggcggcggcggcgaagatcatcgagatcaaagacttgccggtaccggccgggccgagaatcaggctgctggagccggtctcgatccccccgccgagcagagaatccaactcctcgataccgctgctcaaggtttgacggttgtaaccgccgcgatgttcggccgccaccaggcgcgggaatacgtgaatgccgtcgcccatgatggtgaagtcgtggaagccgccacggtatttctggccccggtacttgaccacacggatacgccgacgctcggcgccatagttgggcgtcagctcctccaggcgaatcaccccgtgcgcaacgctgtgcacggtcttatccagggattcggtggtcaagtcatccagcagtaacacggtggcgtcataacgcacgaagtagtgcttgatcgccaggatctgccggcgatagcgcaacgagctttgcgccagaaggcggatctcagacaggctgtcgaccaccacgcgggtcggcttgacccgctctaccacttcaaagatctggcgggtggcttcacccagctccaggtcggaggagtacagcaggctttgctggtgatcggcgttgagcaggctttccggtggggtcagctcgaagatatgaatatgctcatccaagtcccagccgtgggatttggcaccctggcgcagttcgtgctcggtttcggacagggtgatatataagcaacgttcgccgttctgcgcaccggcccgcagaaaatgcagggccacggtggttttaccggtgccgggttcgccttcgagcaaaaacacgtggcttcgcgatagccccccggcaagaatgtcatcaagaccttcgacgccggtggccgccttttcactcaacagctgtttggatgtactcaagaagtgccctcaggtcacgtacaagtagaggggcacgccgactgggacgcgccatattcacttgaccgtagtggccactagcggttcaacgttttggatgaattgtacgaagagaggtcgctttacacgtttttgcggtgctgagctgatcgcctatcagaggccctgttgtagcgccggatcatccgggttctgttgctccagttgggcgagcagcacctgaacgttctgcaactgcccggtctctttccagtaattgaccagcaacacgcgggctttgcgattggcgggatgccgctggacgatttcttccagctggcgctgggccgcctctacttcgtcctgggcgtgcagggtggtggccaggtcatagcgataatccgggttgtctggcgcaagctccaccgccttggacaggccgagcagggcgtaggggcgctcgccatggtgcaacagccagatgcccaaggcatgttgcaggtaggccgactccggatgcgccgccagttgccgggccagcagttggcgcgactcgtcggtcttgccttgcttgtccagcagttcgatttgcgataccaccgcttgcaggttgtccggctgcaagcgcattgcctgctccagggcgttttgcgcctccggcagcagggcgctgtggatgtacagacgcgccaattgaatccagccttcagcggtttcgggctgggccttgagcgttgtcacgaattcatcgagcacctgctgcagtgggccaaagtacaaacccagtgtatcgggcgacaggcccagcaaggcgttggcggcggcaaagcgcaccgattgttccggatcgtccagcaccgggccgagcagtaaggtgcgctggccagtgggcaccaggccgacgatgctgtgaatagcggcttcgcgcaccagcgccgactcattggcgaggtctttatcggccagcttcagcgcctgggggctggggtaattgggcagctcagcatgcaaggcggcgcggcgctcgggcgacaggtccggccggcccagctgttggtacaacacacgtgcggcgccgggctcgccgttatgcgcctgcttcaaagccttggaatagccatgggcgatggctggggggacggccactgccggggtgcgagagaaaaaccaggtgatcagtacgatcagcaacagggcgcacaggccgatgatggagtaacggcgtgactttgacatgcaggcgtccgaaagcttgggcagcaaagttccaagcttcggtcagtgcgaggcgagtgtcaaacccgcgtcaggtcagcacgtagtccgcaggctccaacgcaggcggcaggttgacttcgccaagggcggcgaggatctcgcgctccaatgtccgcaggatagcgtcacacggcaagtcgttttcgtcgaagccgaaggggtcttccaattcgtcgccaatcgcatccaggccaaagaaggtgtagctgacaatcgcggtgaacactggcgtcaaccagccaagtggctcggccatggcgaatggcagcaagatgcagaacaggtaaatggtgcggtgcaacagcagggtgtagggaaagggcagtggcgtggtcttgatacgctcgcatgccgcctgcacctggctcaagctgactagccgggcttccagttgggtgtagcgccattcgctgatcacgccctgttgtgccaggaccgaaaagcgcgcaccgaccgtttgcagcacgctgtccggcaagttggggtggcccactggcatgctgatccaagggtgtatcgcccgggcttgatcttcatggcgcaaatgcgcgaccaagccatgggcaaaaccgcacaggccgcgcagcaggccagcacgctcggcggtgtcccccagcacctgggtctcgcgaatcagcgagcgcacgtcaatgaccatttgccccagttgcttgcggccctcccaccaacggtcgtagcaggcgttgttgcgaaaactcatgaagatcgacagtgacaggcccaacaaggtgaagggcgtagcgttgaccttggaaaaataggcggggtgcagggtttccaccagcacgatgaccgaggccagcagcgtgaccagcaggctgcgccaggcaatgcgcttggcaatggagcctttgagggagaacaggatacccaggacgttgggtttggggcgaacgatcatggcgggcttctgtggcggtgcagatcatcagggtagaagctggcacccggagcgtccaatcacttggatcgaccgcctgatcagtcgactcaatgactctttgtaggagcgatcttgctcacgaaaaacgtcaacaataacgcgcgcatcctgattaaacgcggcgactgtgagtttttcgcgagcaagctcgctcctacagatagccatggccaaaccagtcagccaagttgaaggctttgaccattgctgctacgccgctctggagcgactatttcagcgcttttttcgagttgtaaacgtcctgaaaataaaaacacagaaggataggaagcgatgcgtgagtatttggctgccaccaccgagtttgattaccagcacaccgtcgacgccgcactggccggcaatctgcaagcgctcaatgcctgcgtggaatgctgtgaccgtcacgcgttgccggggcgcatcgcgttgttctgggagggcaaggacggacgcagcgccacgtcaacctttaccgaactgcaagagcaggccgcgcgtttcgccaacttcctcttggcccagggcgtcaagcgcggtgacaaggtggcgggcctgttgccccgtactgccgaattgttggtggtcgtgctggcgacgtggcgcatcggcgcggtctatcagccgctgtttaccgcgttcggacccaaggcaattgaacatcgcttgaacagctcgggcgcagcgctggtggtcaccgatgcagtgaaccgtcccaagctggcggaagtcgccgactgcccgaccatcgtcacggtcgccggggccaagggcgaaggtatcgtgcggggcgactacagcttctgggccgaactgcccagctactcttctcactgcgagccggtgctgctgggcgcagaggagccgttcctgctgatgttcacctccggcaccaccggcccgtccaaggcgctgtcggtaccgctcaaggccatcgtcgcgttccagggctacatgcgcgacgccgtggacttgcgccccgaggacgcgttctggaacgttgccgacccgggctgggcctatggcatctatttcggcgtgaccgggccgttgtccatggggcacccgatcaccttctacgatggcccgttcaccctggaaagcacctgccgggtgatcaataaatactcaatcaccaacctgaccggttcgcccacggcgtatcgcctgctgattgccggtggcgaacagttcgcgcgttcgatcaagggcaagctgcgcatcgtcagcagcgccggcgagccgttgaacccggaggtgatccgctggttcgccgacaacctgggcgtgaccatccacgaccattacggccagaccgagctgggcatggtgctgtgcaaccaccacggcctggtgcatccggtgcatgtcggctcggcgggttttgcctcgccggggcatcgcatcgtggtgctggatgacaaccatcaggagctgccggccggccagcccggcatcctggccatcgaccgcgagcaatcgcctatgtgctggtttgccgggtacgacggcgtgaaaaccaaggcctttgtcggcaagtactacctcagcggcgacaccgtggagctgaacccggacggcagcatcagctttgtcgggcgcagcgacgacgtgatcactacatccggctatcgggtgggcccttttgatgtggaaagcgcgctggtcgaacacccggcggtggtcgaggctgccgtggtcggcaagccttgcccggagcgcaccgaattggtcaaagcctttgtggtgatcagcgagcaataccgtgccaccccggagctggctgaagaactgcgcctgcacgtgcgccagcgcctggccgcccatgcatacccacgggaaatcgaatttgtcagcgacttgcccaagaccccgagcggcaagctgcaacgctttattttgcgcaatcaggaaatagccaaggcccaggcggccgtggcttgatccctttaaaaggaaacaacgatgcagattgaaaacaaggtattcctggtcagcggcggcgcgtcgggcctcggcgcggccaccgctgaaatgctggtcgccgcaggtgccaaggtgatgctggtggacttgaacgccgacgccgtggccgccaaggccgagcaactgggcgacaacgcccgcagtgccgtagcagacatcagccaggaagctgctgcagaagcggcggtgaaggcagcggtcgaggcctttgggggcttgcatggcctggtcaactgtgcgggtgtggtgcgcggcgagaagatcctcggcaagaacggcccgcacggcctggcaagctttgcccaggtaatcaacgtcaacctgatcggcagcttcaacctgctgcgcctggccgctgcggcgatcgctgaaaccgaggcgaatgccgacggcgagcgcggcgtgatcatcaataccgcctcggtggcggcattcgatgggcagatcggtcaggctgcgtacgccgcctccaagggcgcgatcgccagcctcaccttgcctgccgcccgggaactggcgcgctttggtatccgggtgatgaccatcgcaccgggcattttcgaaacgccgatgatggccggcatgaccgacgaagtccgcgactccctggctgcaggcgtgccgttcccgccacgtctgggcaaacccgccgaatatgccgcgctggtacgccacatcattgaaaacagcatgctcaatggcgaggtgatccgtctcgacggtgccttgcgcatggccgccaaataaggagcaatggctatgaacgatcctattgttattgtcagcgctgtgcgtacgcccatgggcgggttccagggcgaccttaaaagcctgaccgcgccgcaattgggcgctgccgccattcgtgcggcggtcgagcgtgctggtatcgccaccgatgccgtcgacgaagtgctgtttggctgtgtgctgcccgccgggcttgggcaggcacctgcccgccaggctgccctgggcgccgggttgggcaagggcacgcgctgcaccaccctcaacaaaatgtgcggctccggcatggaagcgacgattctggcccacgattcgctgcgcgctggcagtgtcgatgtggtgatcgccggcggcatggaaagcatgtccaacgccccgtacctgctggaccgggcgcgcagcggctaccgcatgggccacggcaaggtgctggaccatatgttcctcgacggcctcgaagatgcctacgacaaggggcgcctgatgggcacctttgccgaggactgcgccgagcacaatggttttacccgtgaggcccaggacgcgtttgccatcgcttccctgacccgcgcacaagaggccatcacccacggcagctttgccagtgaaatcgtcccggtgcaggtcaccgtgggcaaggaacaaaaaaccatcctccatgatgagcaaccgccaaaagccaagctggacaagattgccagcctgaaaccggcgttccgtgacggcggtacggtgacagcggccaactccagctcgatctccgatggcgccgcggcgttgttgctgatgcgtgagtccgaggcgctcaagcgtggcctcaagcccttggcagtcattcacgggcacgccgcgtttgccgatgagccggggctgtttccggtggcgccggtaggagcgatccgcaagctgatgagcaagaccggctggagcctggacgaggtggacctgttcgaaatcaacgaggccttcgccgtggtcagcctggtgacgatgagcaagctggagattccccacgacaaggtcaacgtgcacggcggcgcctgtgcattgggccaccccattggtgcctctggcgcacgtatcctggtgacgttgctcgcggccctgcgccagaaggggctcaagcgtggcgtcgcagccatttgcattggcggcggtgaagccacggccatggccgttgaatgcctgtattgaggatgacctatgttgcccaatgacgaacaactgcagatcagcgacgccgcccggcaatttgcccaggaacgtttgaaacccttcgccgccgagtgggaccgcgagcatcgctttcccaaggaagccatcgcggaaatggccgaactgggctttttcggcatgctggtgccagaacagtggggcggttgcgacaccggctacctggcctacgccatggccctggaagagatcgccgcgggcgacggtgcctgctccacgatcatgagcgtgcacaactcggtgggttgcgtgccgatcctcaagtttggcaatgatcagcacaaagagcagttcctcacgcccctggccagcggcgccatgctgggtgcttttgcgctgaccgaaccccaggccggctccgatgccagcagcctgaaaacccgtgcgcgccttgaaggcgaccactatgtgctcaatggctgtaaacagttcatcacctccgggcaaaacgccgggattgtgattgtgtttgcggtcaccgaccccgctgcgggtaaacgtgggatcagcgcgtttatcgtgcccaccgattcgccgggttataccgtggcgcgggtggaagacaagctggggcagcatgcctcggacacctgccagattctgtttgaagacgtgaaagtgccggtggccaaccgcctgggcgaggagggcgaaggctacaaaatcgccctggccaacctggaaggcggccgcgtgggcattgcctcccagtcggtgggcatggcccgcgccgccttcgaagcggcccgcgactatgcccgtgagcgtgaaagctttggcaagccgttgatcgaacaccaggccgtcgcctttcgcctggccgacatggccacccagatcgccgtcgcccggcagatggtgcattacgccgccgccctgcgtgacagcggcaagccagcgctggtggaagcgtccatggccaagctgtttgcctcggaaatggccgagaaagtctgctcagccgccttgcaaaccctgggcggttacggttacctgaacgacttccccctggagcggatctaccgcgatgtgcgggtctgccagatttacgaaggcaccagcgatattcaacgcatggtcatctcacgcaatctttaaggagccgatacatgagttacgaaaccatcctgcttgacgtccagggccgtgtcgggctgatcacgcttaaccgccccaacgcgctgaacgccctgaatgcacaactggtcagcgagctgaaccaggcgctggacagcctggaagccaatcctgaaattggctgcatcgtgctgaccggctcgaaaaaggccttcgcggccggtgccgatatcaaggaaatggccgagctgacctacccgcagatctatatggacgatctgttcagcgacagcgaccgcgtggccaaccgtcgcaagccgatcattgccgccgtgaatggtttcgccctgggcggcggctgtgaactggccttgatgtgtgactttatccttgccggcgacaccgccaagtttggccagccggaaatcaacttgggcgtgctgccgggcatgggcggcacccagcgcctgacccgtgcggtgggcaaagccaaggccatggagatgtgcctgaccgggcgttttatcgacgcggtggaggccgagcgctgcggggttgtggcgcgcatcgtgcccgccgatgaactgctggaggaagcactgaaggtggctaccctgatcgccggtaaatctgtgccgatcagcatgatggtcaaggaaagtgtgaaccgtgcgtttgaagtcagcctgtctgaaggcgtgcgttttgagcgtcgggtgtttcatgcggcgtttgcgacccaggaccagaaggaaggcatggccgcgtttgtggccaagcgggcgccggaattcaaggataagtaagcctgatgggtgtgtggcctgccagccgacacctacctgacaccccaacgatccaactgtgggagctggcttgcctgcgatggcggcctcccagccggcgcctatctacctgatcccctgcggtcaaacttgtgggagcgggcttgctcgcgaaggcggcctagcagtcaacgcagttggattgtgtacatatccattgctgcggtaacggccacttagggttccgccctgacggcggctcactttgcaaaagcggcaaagtaagcaaaacgctcttgccccaccactcggcacctcgcttaggctcggtgtgcccgtaattcgtcagtgatttggggggccgccgccacgcgccatccatggcgcggggcggctaaaccggcatccctgnnnnnnnnnnnnnnnnnnnnnnnnnnnnnnnnnnnnnnnntctcggggtcatcggcccaggcctgcaagtgcgcggccaactggcggaccatgtccagggtgatggcattcaggccggcgggacgattgagggtgaggtggccgatatggttgcgcacgtttgccaggacagcgtcctgctggacctcggcgtggcttgcttgggatgaaacctgagcagtcatctctaactccctgcttttattgtctttataaagatgttcgcgggtgaacgctctcgtgatcgtaccagtgcaaatttgccccgtacaacccggaatcgtgcaggtcgttgttgcatttatgcagtgtcggtcaaaccacccggctggccagaacctcgccgatactgcgacgccgggcatggccctcggcggcgtggatcagttgctccagctctgtcggttcgacgtcgtagaactgttccatctcggccagcgccagcttgaggtcggctgccgtgatgctcggctcgctgacggcggtggcagtgcccaggataaccggtgcaggctcggcaagccccttggggtaacgcgtgcgcgtggcattgttataggccagcgcacaggcgagcagggcgccagcgccgagcatcaccggcgccagttcgtaccagccaagggcgacggatgccgggtcggccagcaccagggtcatggccaagccgccggccggcgggtgcaggcagcgtagccagcagatgaggaccactgtcatgcccgccgccaggcacgcgctgcccaaggtgcgccccaggacgcgggcgaccagcagcgccacgacgcctgcacacaggtaactgccgatgatcgaccagggttgggccagcgcgcccgatgacacggcaaacaacagcaccgccgaggcgccaagagggccgagcaggtgcagggccacctccatgccgaatacttgggcacacgcccagacactcaatagcgtgcccagggccatgccgatggctgcacggctccattcggcgggacgggtgttgattgcagcgggtaaccagcgagcgagcattgaaagacggtccataaacggcgggcgaaaaaaaaggcctgcctggtttcccggaacagccctttgaaggttccaacattgggggaaggaacctgtgcagtgtgccgcgcttgattcagtggcgctactgcatattaatgaatgttaaatgcaaaacaaatgcagttaaacggcgtcgccgtaggtgatcggcccggtggctgtggccgttgttgggttgatcttgcccagcacgcgactgtgggtttcttcattgaacaggcgctcttgcaggtcttcgcgcagcctgggatcgtcggccagcggccccttcaacgccaccagtgcgtcacgcaacgccatcaaacgatccagcctgggtaaaggtacggttaacaggtcatctcgcacggcattgtcctctcaatgaagtaagccatcgcgcgcgggcagcctacaacgtccttgttgttgtgaagtgccctgacccaagcgttacaggttggtcctgacggtcgggtggtagatagtgagtgcacgtggcagcgagtctacagttgggctccgagcaccggaagggaaagtgcaccagccattacgcaaacaaatgtaggcactttcttggtacctatgatgaaagccgcccactcgtggaagagtgggcgctctttcttacaatgcagccggaaaagcactcagggcgtcgaggtttttgccaaatgcagcaacacataggagtttttgtcgaacgctgccgtgagcgtcggcgtgattgagcgcaggcgcggatcgtccagcgcctggaagtcggtctggctcatcactatccatgccggcgcctggaccggtttcaattcggcgggcaattgagtaaacaacggcaccttgtcgcaatcgaagttgaccatgaacttgatggctttcgcgtctttgcccagtgcatgcaataccagcggcgccggttgcagctgaacttgcgccttgacggcgaggctgaaggtgcgagtgtcgtacacctgacgttccaggggttcgaccaccatgatgtaggtgctccacagggcgagcacggcggccagggcggggccgtaggtgcgcatccgcgagcggaccaataccagcagggccagcacctgcagcacgccaagcacgacgaagatgagcgcaaggtcggccagcggctccgggtagtgccgtcgcgccaccaccaggccaatgaccagcaacgctggcaacagcgtccagatgcccagcatcaaggcgcgcagccaggcaaacagtcgcccttgcgtgacctggaaggggtacgcggcaatgatcgcggccatcggcaacatcggcaggatataacgcgctttcttggcttggggtaccgacaggcccaacatcaccagcacacccgctgccgcgcaatagagcaccagcttcaacgctgggtccggcgcacgttgaccgcccaccagcaccgccagcagcactaacaatgccagtggataggccagggcgtaattgcccaaagagctggtgaagtaatacagcacgccgccggagccttcgctgccatccatgcgcccaaggaactgcatgcgaatcacgtcatgcatgaagtcttcaccaccgctgagcttggccagcagcagcaacaggccgacgcacgccgccagcagcgccagtgccagcaggccgaagctgaacagctggcgccactggcggttgatcaggaagtagctgcacaacacgcccgtggggatcaccaggccaatcgggccacgaatggcaaaccccagcagcaacagcaaaaatacccaatgcaggcgtttggcggcggcgaaatggtcatgggcatagcccaggtagaacaccgccaacgccacggcggcgagcatctgatccagggagactgcgcgggtttcgctgacaaacgtactgctgagcagcagcatcgcaatgctcagcaggccccaacgtggcgagtagggcgcggtgaggcgatagaccagcaccacgatcagcgccgacgccaccgccgtgggcagccacgccgtcaggctggtgacctggcccaagggcaacgacagcagccacgtcagcagggtcgacgtcgccaggtaatcggcatacggctggccataggtggtggggaagaagctgggcccatggcgcaacatttcctgggcaaacaccacgaagcgcgaatcaaaaccgatgatcgcctggtgccagttgccggcgataaacagcaccagcgccaagagtccaagccccagcgactggtgacggatcgttgcacgctgcgcggacggtaaggcgatgttcacctagcaagcgtccttgacctgttccacccagttttgctgggggatcggtaactcgcaggagtcgccgcggccgatggggaagtacttgaagcctttgcgcgccaggcgctcgccgtcgtacaggttacggccgtcgaagatcaccgggtttttcaggcgctggtgaatcaggtcaaagtccggtgccttgaattgctgccactcggtgcacacgatcaacgcatcggcgccgcccaaggtggactccggggtgcccatcagcatcaggcgcgggtcgtccccgtagatgcgttgggtttcctgcatggcttccgggtcgaacgcacgcacattggcgccagcggcccacagcgcttccatcagcacacggctgggggcgtcacgtatgtcatcggtgttgggcttgaaggccaggccccacagagcgaacgtcttgcccttgaggttgccctggaagaacgcgttgatgcgctcgaacagcttgctcttctggcgctggttgatggcttccacggcttcgagcaggtcgctggagcagttggcctgcttggcactgtggatcagggcgcgcatgtctttggggaagcacgagccgccataaccgcagccggggtagataaagtggtagccgatgcgcgagtcggcaccgatgcccaggcgcaccgactcaatgtcggcgcccaggtgttcggccagctcggcgatctggttgatgaagctgatcttggtggccagcatgcagttggcggcgtatttggtcagttcggcgctgcgcaggtccatgaagatgatgcggtcgtggttgcggttgaacggcgcgtacaggtcgcgcatcacgtcacgtacttcttcacgttcacagccgatgatgatccggtccgggcggcggcagtcggcaacggcggagccttccttgaggaactccgggttggagacgatatcgaactgcagctcacggccggcggcgcgcaggttattgaggatgtggtcgcgcaatgtgtcgccggtgccgaccggtaccgtggatttctccaccaggatcaccggtgccacgcggtggcgggcaaccgcatcacccaccgacagtacgtatttcaggtcggccgaaccgtcttcatccgacggcgtgcccacagcgataaacagcacttcgccgtgttcgacggcgagtttttcgtcgtgggtaaagcgcaggcgcccgctttccaggttgtccttgaccatggctgccaggcccggctcgaagatggtcacatgacctttctgcagcgattcgaccttgtgcttgtcaacgtccatgcaaatgacatcgtgaccgacttcggctaatacagtggcctggaccagaccaacgtaaccactaccaaatacactgattttcatggggtattcctgggacttgaggtgctagcacgacgagagttgataaccagtacaccgaggatgaccaaggccacccccagggtttttgaaagcgaaaaattttcgttgaacactggcaggctggcggccagcaaatacaccagcgcgtaactgatgctgagcagcgaataggcgcggcccaggggtaagtgcttcagtgcgccgagccagcacagcatcgacagcgcataggcgacgatcgccaggatcaccacgcccagggcgcccaggtcgatgctgttatccgtgaaggcggccagccattcagaggggagcggcaggcgcgtcatactccagcgcatgcccagttgggcaccactcaccaggccgacactgcccagggccagggcgaaaccccgcacgcgactcatacctgacgccccagcaagaccacgccggcaatcaccagccccacacccagccagtgacggccatcaatgggctcgtggaacacaaagcgcgccatcagcgtgaccagcacaaaattcaggctgagcatggggtaggcaatgcccacttccaggcgctgcaacaccagcagccacaccagcaagcccaggcccaggcacaccagcgccgaccacaaccacggcgagcgcagtttcgatgcccagccatccggcacgccgcgccagctttccacagcaaacttttgcgagacctggcccatgcaagtgagcaggcaggccgtaagcagtagcagcagggtgatcatggcgcgacctgcgggaaaatcaggatcacgatcttgccttgtgcataccgtttgccgtcggtgggcagcagtgcgagttcttctttttcaccggtgctattgacgcgcatcaccacgcccaccgcgccggtacgacgggtttcggccatccatgactggatgcggttacggtcgaccagacgcggcgcggtgtcctcgtaagccaggccgtacttgacctcacccgaggtgttgtacagcgtgatatcggggcgtttgaggcgccaggacaacgccgaggcggcgcccaggtcgttgctcagcagggcaacgctgggctgcaactcgtcgatgtgatcgatgatgaattggtccggggtcttgttgtaaaccaccgagtggggcaatgcggcaggcaccagcagcaccagtaagccactgccgatcagcggcgcggcccacaatttcagcgggcgtgccgcttgcagcagattgaccacgatccaaccgaacaagaagatgaacaccagcaccaggctgagggtttcctcacccggttcgtatactggcttcttcaactggaaccagctgagggccagcaataccagcacaccgatcgccaggttcaaccaaccattgatgcgcagcacgcggccgcggcctagagccagtttgtcgctcagggccgagcccatcagcaaggccaggggcaacatgcacggcatgatgtaggagggcagcttgcctttggccaggctgaaaaaggccaggggcatcaacaaccacagcagcaggaacgcggttttcggtactcgccgttgcagccaggcctgcttgagcgtggacggcagcagtgcgacccacggcagtgcgaaccctaccaacaacggcaggtaataccagaacggttcggcgtgctgggcggcttcaccggcaaagcgttggatgtgctcgtgccagaagaagaaatgccagtagtccggctcttgcaggtgcacggccaacgcccacggcaggctgacggcaatcgccaccaccacggcaacagggccaaacttgcataactcgccaaaacgtttttgccagacggcgtagggcagggcgaccagcaccggcagcaaccacgccaggaagcccttggtcatgaagcccatgccgcatgcaaggcccagcaaggcccaggaccacaagcgcgcacgccgcgtggtgctgtcgaaacagaaccacaaggccacgcccgtcagattgatccagaaggtgaactgcgggtccaggttggcatagccgcccagcgcggccacgctgacgaagctcatgtagagcagcgtgctgaccaaactcttttgcgggtcgctccacaaccggcgagagaccagatacaccagcagaatgctcaagccggtactcaaggccgaggcaaaccgtacgccaaacaggttctgcccgaagatcgcctggcccagcgcgatcatccaatagcctgcggcgggcttctcgaagtagcgaatgcccatgaagtgcggcgcggcccacttgccggtcagcagcatttcctggctgatttgcgcatagcgggtttcatcgggaatccacaggccatgggtggccaacggcagcaggtagaacacggcgaacgccagcaggagcaggggcaaagcccagcggcggatcatgcctgctgcactcccagccaaccctcgcggccgctcaaggcgccgcgcaccagctgttgctggggcagggtggtcacatccgtgggcaacagctcgcccaaggttttgaactcgatgccgcgctgcccggcctgggcgagcaactggcgaaaatcattggccatcagaatcccttctacttccgcgtggatcgtgtagacgttcagctttgacgcgttgaaccgatcaagaatgaagcggttgaaatcgttggcagccaccaccggcccgacgacttcgtcgaaggtcggcaggtctaccggaatttgtggggtgcccgcgctgccatcggccaaggttggtcgaaacaggctggtgccccggcaatcgctgttgtagcgaaagttgaagccttgcttggcttgcaccacgcgctcatcggcgcgccaaccggcggccgctgaacagtcgatgcgctcgccgaggatgtcgctcaaggtgtctacgccgcgtcgaatctgctcgaccagctgtgcctcgctccaacgcccggtgttggcctgccagccgtggtggtcccaggcgtgcaggccgacttcatgcccggcggccttggcctggcgcatcaaatgccccaggtcgcggccaatcggcttgcctggccaggcggtgccggccagcaagatgtcccagccatacaggccggcagcgttggagcgcagcatcttccacaggaactgcgggcggatcaggcgccacaagtggcgccccatgttgtccggcccgacactgaagaagaacgtcgccttgaccccggcttcggccagggagtcgagcaaccgtggcacaccttcacgggtgccacggtaggtgtcgacgtcgatgcgaagacctgcctgcattactttttatccgcaatttcaagcatggcttcacgcaagaagaaatcgagcgtgttgccgatggtttcgctcatctctacgctcggctcccagttcagcaggcgtttggcgttttcgatgctcggcttgcggtgtgccacgtcctggtagcccgtgccgtagaacgccttgctctcgacgtcgcgaaaaccggcgaatggcgggaagttgtggcgcagcgggtgagcctcgaactgacgcagcagttcttcgcccagttggcgaatgctggcttcgttttcggggttgccgatgttgatgatctggccgtcgcacacgccattgtcgttatcaatgatgcgtgccagggcttcgatgccgtcggcaatgtcggtgaagcaacgcttttgctcaccaccgtcgaacagacggatcggcgtgccttccaccaggttcaggatcagctgggtaatggcgcgggagctgccgatacgcgccgagtccaggcggtccaggcgcgggcccatccagttgaacggacggaacagggtgaacttcaggcccttgtcgccgtaagcccagatcacgcgatccagcagttgcttggagacggagtagatccagcgttgcttgttgaccgggcccaccaccaggttggaggtgtcttcgtcgaaatactggtcttggcacatgccatagacttcggaggtcgacgggaaaatcacgcgcttgttgtacttgacgcagtagcgcaccagcttgaggttttcttcaaagtccagttcgaacacgcgcagcgggttacgggtgtattcgatcggcgtggcgatggccaccagcggcagcaccacgtcgcatttcttgatgtggtactcgatccactcggtgtggatgctgatgtcgccttccacataatggaaattggggtggctgcgcaggcgttcgatggcgtcggagccgatatccaggccgtagacttcgtagcggtcgtcacgcaacaggcgctcggacaggtggttaccgataaagccgttgacgcccaggatcagcacacgggtacggcgcggcttgcgacccgactcggcgccgcgcagtacagagccatccaccaggcctagttcatcggccagggacgggcctgccaggtataggccgttttcgttgcgctggccgaacttgaccaccagggaatcttcaccgcaggcaatgcgcagcgggttgacgctgatcacacggccaggcgccagaccttcgttgcccttgactacgtcggcttgccatacgatcagcttgtgctcgcccacggcgcagaaggcgcccgggtacggctgggtcaccgcacgcaccaggttgaacagttgctcggcgggctgtttccagtccagcttgccatcggcggcggtgcgacgaccgaaataggtggctttgctttcgtcctgagcggtttcgctcagcttgccctgggccagctgtggcagggcatcacgcagcagagccgtggccgcatcacgcagcttggcgtgcaggctcaggccggtatcgctgcgttcgatggcgacagtctgctgggccaggatggcgccggcatcggcacgcttgaccatacgatgcagggtcacgccggtttcggtttcgccgttgaccagcacccagttggccggggcgcggccacggtacttaggcagcaacgagccgtgcaggttgaacgcgcctttgcgggcggtggccaacagcggttcgctcagcaggttgcggtaatagaacgagaagatgtactccgggttcagcttggcaatacgttcgatccacagcgggtggttggcgtcttccggagcatgtaccgggatgccattgcgggcgcagagttgggcgacggaaccgtagaagttgttttccttggggtcatcggcatgggtgaacacggcggcaatgtcgtaaccggcgctgagcagcgcttcaatgcctgcgcagccaatatcgtggtaggcgaatacaacagcttttgaactcatgactggacctgatccgaagaagaagtagacgtatgggaagacaccaggccgtcgaccacgacgactggagccggtgctgccggttggttgcgcagcactttttcaataaagaagcgtgggcgggcacgtacatcgctgtacatacggcccaggtattcgcccagcaggcccatgccgatgaactggccaccggtgaacacaaacaacaccgcaaacagcacgaacaggccatcaccggcccagtcggcgccgaaggccaggcgcatgacgatcagggcaaaggcaaacagcacgcccagtgccgccaggctgaaaccgacgatggacagcaggcgcaagggcgtggtggtcatgcaggtcagcaggtcgaacatcaggctgatcaggcgcatggcgctgtatttggattcgccgtgctcacgttcggcgtggtgcaccaggatttccgtggtgtggcgggcgaagccgttggccaggatcgggatgaacgtgctgcgctcacggcaggcgagcatggcatcgacgatggtgcggcggtaggcgcgcaacatgcagccgtagtcggtcatggccacgccggtagagcgctgcacggcaaggttgatcaagcgcgacggccagcggcggaaggccgagtcctggcggttattacgcacggtggcgaccacgtcgtagcccagggcagcttgctcgaccaggcgcgggatctcttccggcgggttctgcaggtcggcgtcgagggtgatcaccacttcgccacggcactgttcaaagccggccatgatcgccgcgtgctggccgtagttgcggttaaggatcaccgctaccacattgctgccgtcttctgcggcggcgtcttcgagcaattgggccgaattgtcgcggctaccgtcatccaccaggatgatttcgtattcgtaagccagttgcttgcaggctgccgtggtgcgacgcagcaactcaggcaggctttcttgttcgttgtagaccgggataacgatcgacacgcaatgaatagggtagggtttcaaagattcatgacctcgggctggagcaacttggagcgcgaaaacggcagtgattattgggcaaaactacagcccgcagactacaacgcggagctaaagataaagcgtaatcaacaggttagtcgataaaccccggattgctctgaagtgttgggtacaaggttaagcgcaaaaatgttcaacgaatatgaaaggcggatgaaaaacccgtttatttgacaggtagacagctagggttcagctaagtaatcaaggcgttacatgtaggcctcacagggcgatatcggtgcttcgtgcaagacgcttggttcaatctgagcgaggcgatcagcccaatgctcgcccttcaacaatcttctctgcattagcgctcaagtgccggtaaagtaagccctctcttgccagggtactcggatgaatagcgtgcagcttttacgcggccagttgcggccagcgctgatgggattgttgatgacggtggcctgtgtcaccagcgtgcgggccgatcagggcgtcgcgctgaccccactggaccaggtgccggacggggtggaagtgcgcggcaagcaggtcgccgcttatacctgggatgaccgccagggcaaaaacctgttggtactcgccgagcaagtgggtgagcgcgatgacgatggtacccagtcggcctttgtctacgcggcgcaatacgtgctgggaggcgagcgccccaagcgcgtgtggatgctgtacgacgatgtgcagcactgcgaattcgacgccgggctgcgctttgaccgggctgccaccaaggtcaccgacctgctgggcgacggcaacacccaggccacggtcggttattcgcgggcctgcaccagtgacgtcagccccaacgaattcaagctgatcatgcatgttggcaagtccgagaagtatcgtctgcgcggcctcgaccgcgtgggcgccagttggtgggatgaggacgccggcgccttgcgcggtatgccactgccgactgactgcagtgtcgcggcgcagcaagccttggtcaaccaatacaaggagcagggcaccgaactgccactgccgggctgctatggcgacgagaaggactttgccaaggcgccggacagttacctcgcctttatgcgccagcagtggttcgcgctgatgcaacaacaggacgccgactggagccagtcccaggcccaaccccaggccgccagcgaggaggacgacaccgccccgtgattttgtgccagggccggtcctgggttagactcggccttcgccaatccactaaatacatcgactaatcaaatagttgctctgtgtatttaatccaaaggctgatctaccttgaccgagtccatttgcaacccactgaccctttacctcacccgcctggcgccttccagccaactgaccatgcgctacgtgctacaggatgccgccgaccgcctgggtttcgaagaccacaacctcgaagagattgactggcacctgctgcagcccgaacacgttattgcgctggtcgctgccttgcgtgaggacggctttgcgccgaacacctcgtcgctgtatgtgaatgcggtgcgcggggtgatgaacgaggcgtggcgcatgagcttgatcagccaggaccacctgttgaagatgcgctcggtcaaggccacacccggcacgcgcctgggccagggccgcaacctgcgccgcaccttgatccgcgagatgctcgacgtctgcgccgccgaccctcggccccagggcctgcgggatgccgcagtgatcggcctgttatatggctcgggcatgcgcaagtcggagtcggtcaacctggacctggcgcaggtcaactttgacgagcgcagcttgcgcgtgatcggcaagggcaacaaagagttggtcaagtacgcgccggactgggcgtttgccaaacttcaggcctggctggcgtttcgtcgcgagcagctcaaggaaggtgagcaggacgacagcttcctgtttaaccgcatccgtcgaggcagccatatcacccgggaacgcatcaccaagcatgcgatttactacatcgcgcgccagcgtggtgatcaggtgggggtcaagatcatgccccatgatttccgtcgttcgtttatcacgcgggtgatcgaggagcatgatttgtcgattgcgcagaaactggcgcatcacaccaatatccagaccaccgccagctatgacgtgcgtgacgacaatgagcggcggcgggcggtggatcggtttgatttgtaggcttgtggatacaccacgattcaaatgtgggagctggcttgcctgcgaagagggcctcacaggcaaccagaatgttgaatctgcctgctcctctgctcaggaggaaggcgggacgcttgaaaccaggtgagccggcaagcgccgcaacgtccacaaggtggtcagcatcgcggcaagcgcacacagcgcaatgccgatcaacatcggcgccggtgtatggtcggcaaagatccccaccaaggtcatcgccacagccgccgtgaccatctggatcgcacccagcagtgcagacgcagaacccgccaccgcaccatgatcctccagcgacagtaccccggccgccggcaatagcaggccaagaaagccaaaaccgataaacaacagccccatcatcaagcccaggctgtcaccccacagcgtagtagccgccagcaagctcatgaccgccgccacgcccaccaccgaccagcgaatcaacggcgccaggccaaagcgggcgctgaggcgggcggtcaattggctcatggcaaaaaacgaagcagcgttgagcgcaaagcacaggctgaactgggtcggtgtcaggccaaaaaattcgatgtacacgaagggcgcgctgccgatgaacacgaaaaaggtggccaggccaaacccgcacaccaccgacaaacccgtaaagaccgggtcgcggaggagggcgccataactgccgaacgcctggcccagtgtcttgcccaggcggcgctcggccgggtgggtttctggcagttgtacggcggtcatcaccagacacagcacggccaccaccgccaacacggcaaacacttcgcgccagctccagatcgaaatcaccaggctaccggccaaaggcgcgaggatcggtgaaacactcatcaccagcatcaacaacgccatcaggcgcgccgcttcatggccggtgtacaggtcgcggacaatcgcccgtggaatcaccatccccgcacaggcaccgaacgcctgcaccgcacgaaagccgatcaacacttcgatggtcggtgccagcgcgcagccaacactgccaatggcaaaaatcaccaaacccgcataaatcggtggtttacgcccgaacacatcgctgagggggccgtagaacaactggcacacaccgataatcataaagaacaccgtcaaactcatctgcaccgccgccggcgtggcctggaggctggcgcccagggtgggcaacgctggcagatagatgtcgatggcaaacgggccgacagcggtgatcaagcccagcaacagggcgagacgggcgatacgttgaggcatttggcaggtccaggtagagcaacggacggtcagcttaagggaaccgcgcagatccgcaaacttaggcttcactaacaagcaccagctgccgatacagctagcagcgacactgaaacggttgggctcccaaccggcggtcctggcacagggatatcactatgacgatcaaattacgcttggtgctgttgattgcgaccgggttgctcaccgccttgatcatgagcctggccggctacctgggtaatacgcggatggccgatgcggtacaggacaacgacgtcagcatgacggtactgcgcaaccacatggaagccgacatgatgcacgacgccctgcgtgccgatgtgctgtcggccatgttggtcgggctgggcaaaagcaccagtacgccggccgaggtcaacagctcgatcaaggagcatgccgaacacttccgcgaggttctggcggaaaacctcaagttgccgctggacgcctcgatcaaggccagcctggaaaaaatcaaacccagcctggacacctacatcagtgccggcgagcgcatcgtcgcgctggccctggagaatccagaggccgcacgaggggaactgcagaccttcaatgccgcgttcagccagttggaagaacaaatggcggcgttgagcgaactgatcgaaaacaatacccaactcaccagcaccggtacccggcaaaccatcagtaacgctaactggaccttgattattgtattgggggcgagcctgctgttgctgctggcacaaggacgttgggtgaccctgagcatcatggggccgttgcgcaccgccagccgtattgcccagagcattgcccatggcaacctgagcgagccgattgccgaacccaagaaccaggacgaagccagtgcactgattcgcagcctggcgacgatgcagcgggatttgcgcggcatgatcgaagtggttcgcagcaacgcccatggcgtcaatggcatgagcgagcgcctcagccagggttgccatgaagtggcaggcagcagccagcaacaaagcgtcgccgccagcaccatggccgccgccgcgagcgaaatgaccgccagcatcgaagaaatcacccgtcacgcccaacgtgccctggacatggccagccaggctgaaaccctggccaaggacggcggccgggttatccaccaggtggtcagcgacatggatggcatcgcccgttctgcccaacagtcagcccaagtgatccgcacgctggacgaggagtccgaggcgatctacagcattatccaggtgatcaaggggattgccgaccagaccaacctgctggccctgaacgccgccatcgaagccgcccgcgccggtgaacaagggcgcggctttgcggtcgtggccgacgaagtgcgcagcctggccggacgcaccagcgcctccacccaggaaatcgccagcatggttgggagcatccagcagaacacccgagcagcggtaatcagcatggaggagggcgttgcccaggtggataagggcatggcagtgactgccgaagtggaacgcgccattcgcgagattctccaggctacgctgagtaccactgaattggtcaacgatatttcccgcactattagtgagcagagcctggccagtaatgagattgctcatcaggtggagaggattgcggggatgtcggaaagtaacagtcgggtgattggcgagacggcgtcgacgacggatgaattgtcgagtttggcggggaagctttcgcagtcggtggatcggtttaggctttgatggatgatactcagatataactatactaaatagtcatttagtatagttatgcttaaaggctattaaaaaagaggagggtagctcaacagatgaactaggggtagctcatccttgctcgttatcttccaaatttgaacgctatctctcaacgattagaaattagcaccccgtgaaatcacgtgtaatcggtaacaagtcacgtcgtttatgggctgcaaccatcaagccggtggatggctcaattgatcctacgcacgaactggagtcagcattatcgtgccgttaggttttacttccatgtcgagtgtgtcgccgctggccaacttgatggccgacaggagatcgtcagtcagcggtatgatcaaatcgccagtgctatcagctgcatcctggcatttgactttccagctcgtatttttagccttgggcttcgggttcattattttctctaggtgatcagatgacagagccaatttatgattatgacccagcagacgcgctggttgattcagaggccatagctgtatttttggctgatgcacacgacaccggtgacgcggctttcattgccgaagcgatggccgttgttgcacgcgccaagattcgtatcgagacagatggccaagcctaggagtcatcgtcctgaacatgtgttgctagtagcaacaccttaacgctgatcacttggtgaaaagcagcctccagaacccctcagctacgtataggacgatacgcataatgtatattatgttaaatgagatactatgtgagatacgttcataagccacgtaagtcactgattcgacgaattcgtttttacgcctactctttcaacgggccatgcccatgtgccgtttctcttcaagtcaacgactaccgctgctcgtgcaagctgatgacgtggcaccgttgcccatgcttgcccctttatgtacgtccaactcagactcaggaaccgcgctttcaatactgcggcggcgcatctgcgagcgatccaggctttctatagctacgcaaaaagccggggctgtgcgctcagacaaggtgatgcttggcgccgagtgaggactgcgcagctgaaacccttatctttgatcgtgacggcgccgtttctggtatgcacagatcttcaagattctgtcatcgtaatggctcttcataattaacataactatcgttgtgtttaattttgagggctgctagcatcgaaattgccacgtggcattttcgaggagaaagctctcatgcaactctctgtgcgaaaggcgttcctggaagacggggccgtcctgatcaaaggttttctgaacaaagatcaattggctgagtgccgggcagcctatgactgggcagtcgagaatcacggccctcatgcaacccgaatgttcgacgggactgagcaacagtcccatgttgataatgccaaccccgtcgccaaggcgcgtcttgaagaactcgtaacctccctgccctttggccagctgtttgcgcagctctggggctcggaaaacgtgtggtacttcgccgaagaggtgtttctcaaagcaggtgggcgcggatctcgcacgctttggcatcaggacacgtcttatctgccgtgggccggaaaccactgggccaatgcttgggtcagttttgaatcagtgccgaagaaaaacgctttggaaatcgttcgaggttcacacaaaggaccacgctacgacggcactacgtttcgcgatccaaacgatccgactcagccgctgcatggcggcgacgcattgccacgcctgccggatatcgaggcgctgcgccaaaacgatcccgaatcattcgacatcatttcgtgggctaccgagcccggcgatatcgtcttgctgcatccgggttcactgcatggtggcgctccggtggatgaagccttcccggatcgtcacaccttcgttttccgtttctttggcgacgacgccaccttccatcctttaccagaaaacagcgcaagcggttacccgcagcaaggcgtgctgtttactgaagagctgtcgaccctgaaagcgggagacggcttccgccacccaacgttccgccaattaatataaaaggagcattgccatgaacactcaagacctgcagcgtcagtccttcaaccctggtcacacccaggcaatctacgacaacttccacttttcccaggcgacacgcgtcggcaacatgatctgggtgtccggccaggtcggtatcgacgaggccatggttccagccgaaggcatccaggcgcaatcccatctggcgcttcagtctttgcggaccatcctcgaagctgcgggtgcaagcctggccgatgtagtcgagttgatgacgtttcataccgatctgcaggccgaagtgcacgcttttggacaggtaaaggacgaatacttccctgaacgttatccagcctggaccgctgtcggcatttcacaactggcaatgccgggcttgcgcgtggaagttcgggccgtcgcggtgattggcagcggtcgaatctgaacgattgcatgatcgcgacgtgccaagccaaaatggcgttcgcagccgctgccggctcaacgccttcaaccaacggaatcactttctctcatgaatgatgctcaagcgccttccacggatagtcagcactccattgacagtgattcagcgcccgccccacgtcgcggccgtccggtaggtaatcgtctggaaaaacgcggtgaactgttgactgcagcgattgaagtcattgcccaggagggttatgccgggacgtctctgcgcaaagtcgccagtcatgccggctgcaccactggcgccgtgacctattactttgccaataaagaagaaatgatcacggcggcggcgcagagtctgtttgacgagttcgatcacttgctggatgccgatcaggaaaaggtcgatgtcagggcaatgatcgagcagtggttgaacctgactcaagccaacgactcggcgcgttggctggccttgtttcagatgctcgcccacgcaaggcacgaaccggtgtttgccgacgtaatccagaaacgttactcgcgctttcgcgagaatctcgcaagcattctgggcaaaggacaaactcagggcatcattcgcaaagacattgctgccgatctgctcgccgatcagctcagcgcgctgagtgacggctggatgatgatgttgccaatcgagccagagcgatttgaagccaaacgcagcaagaccttgatggatgcggtcatcacgctgatcagccccgctcgctaaaccataccctgccctcaggcatcaagaagattcgcttcatttgcgcagcgaatcctgcttaatggcgcccgcctttctctccacccctcggttaatcgtcattgcgccgatttcactttgctgaattcctgttccgtcatatattcacataacatctgtgattataaataaaagacggaggtgaagatggatgcggatctcgatgaactgtcgacgcaatcacgacagcgacgattgttattgcaagcgatcggaggcgcggccctcgccggagggctcggtgtcaccgggcgtgcgatggcgcaaacccaagacacctcgatattggatgtggtgatcattggcgcaggcctgtccgggcttacgtctgccagagacctccaggccgctggctgcgagtcgtttgtcgtgcttgaagcccgtgatcgcgtcggtggtcgaacacttaaccatgacctaggtaatggcgtgatctgcgaggctggtggtcaatggatcggccccggccaaacgtcaatcgccgatctggccagacagcttgatgtcgtaaccttccctacgtactacaagggccaggcggtctatctgatagacgaggtaagagtccaagcggacgtcagcgatggtccaaattccaatactgacatcgtcgcaaaactgaacaaactcgccgaaggcatccccagcgaagcgccgtggaaagccaaggatgcggttgagctggacaaactctcgattggccaatggctggccgggcaaggcattagcaatgtcgacaagatcggcttcaatatgtccgtgagcctcaccttcggtaccacgccggcgggcatggggctcctgcattacctggcgatgatcaactcctctgactgccgtctcgaaaagctcgaaggtgtccaagggggtgcacaggaatcacgtttggtaggcggctcgcaaatcctcagcttgaagatggcgcaagctctcggagaaaaagtccgattggcgtgcccagtgcgcaagattgtcggttgggatcgtgatgtcgtcgagttgcataccgatcagggcatcatgcgcacgcggcaggtgattgccgcgctgagcccggcgctgtgcaatcagatcgtcttcgatccacccctgccctccgggcgtgccgagctgcatcggcattggccggcccatgcaccgatgcgtaagaccgtgcacgtctatgagcgcccgttctggcgcgaccaaggcctcaacggccagatcgtgcaagtggaaggtccgctgatctgggcctttgacaattcgccggaggacggcagcctgggggtgctcagcggcttcgtcagaactggccaattaccccatgatcccaaaaccgcgcaggacaccctgtcggcgatttacgccagcgccatgggcgaacaagccctgcacccgattcagtttcatgatctggactggggcaagatcgacccgtggagtttgagttgtatttcccccatgccccccggtttctggacgcaatggggcgagtatctgacgccggcggtcgggcgcatgatctggtcgggtaccgagactgcgcagatctgggccggggcaatggacggtgcagtccgcgccggacatcgcgcggcaatggaagcgctgcaggcgttgcttcaaccacggaggaacgcctgatgaagcggattatgatggttggaaccatcgtcgtgagcgcagcgttggccggatcaattgcgatgtatggaccggaactgttggcggactatcgtttcatgcaggccgtggatcagcacgacgcggcataccaagccaatggcggtgcgtggccacagttacaggacacctgcgcgctttgccatggcgcaaacggtcaaccgcgcgacgctcaatacgcagcgcttgcagggcagaccgcagcgtacatcgaaaaccagttgcacgcgtttgccgaaggacgtcgccacagcgcacagatggagccactggcggccaatctgacgggcgagcagatcaagcgtctggccggctatttttccgaacagaaacctggcgtgactgaagtcccgacgaaggatgatgccctggaccagcgcggtcagcgtgtggtcgccgccaatgggtgtgcagcctgccacggcgaaaaactctctggcggtcccctggctccgcgtatcgccgcacaagggcagctttatctgagcgatcaactgagcgctttcaagcgtggccaacgcaccgatccgacgcaggccatgaatgccatggcgagcaccctgtccgatgaagacatcaaggccgtcgcgcattatctggccaagctgaacccttgatcctgcacgggcaaggatgcccccgccctcctctgcatcacgcaaaaaagccgccagatcggcggcttcgaacacttcaactaccccctagcgcgtttgcagaactgccattgcgcccttcgcgcgctccagcgcgcaatacgcgtaatacaggtgcaccagcagataagcccaggtggtcagtgcaagcacgtagaagttcagcagcacattgctgtcgtcgccgggaatcttgtaaaaatcgtagatgcaggcaatggtcagtgaggcgagcatgccaaacatcacaccgatcgcgtgcagtgactcgccgacatttgccaggcgtaccgcgaaatacaccaggtagaccgaaaacatcacccacatcagcacgtagaaatacggtaggagcgtgaccagaaccttggtcgagatcaacgcgagtgtgcccagcatagcgccggcaaacatcatgagttccttgcccacagacggcttgtaggcatgcgtcaccgccattagcccgagcacggtaatcagcggaatcccaaaggctctggagaacgcgtcgcaaaagtatgaaatcaggtacgcatgctccgatcccgtcaggaaaaaaaccaggaagtttgttgcggaaaaggcaaccacaaaccactccagagccagtaacaggtttcttttcttcaaaaacctgatgccgaaggtcagcccattggcaagcagcaagaaacaggcaaggcacagcacaatatttctcggttccataacgatagcctcggtacagctgacagataatttgatggattagcggggttgaggaacgagtgcggccagataagccgcaatcgcttggcgctcctgcgctgacagcgccgcggacatggcttgcatggcaccactgggctcaatgcgctcgccgctggcaaaagcgttgagctgggccaaaaggtagtcctgcccttgtgcagccaggcgtgggtaggcttcgtggcccatcagttgtgcaccatggcaggcggtgcagcctcgggtttgcaccagttgtttgccttgaaccttcagaccctcgtcagagctgacagccccatgggcaccgaccgattgccgggcgtagaacttcgccagcagatcaatttcatccgggctgagggtcatcgccaacggccccatgttgggcgcaagccgttgtccgctcgcaaaattgcgcaactgggcggacagatacgcggcgggttgcccggccaggctcggatacgtcgagttcagcgagttaccgtggctgccatggcaaccggtgcaggcatcggtcagatgaggccagtttccgcgttcggcctggtaggtctcagtggaggtggtgatgtaactctgcagccgatacaggtcgagcagatcgcggccaaaaatcgccaacagcatcgcaatgaccaccatgacgccaagtgctaagatttttttcattgccgcctcctacaccctacgtaacgcgttgagcacctgtaaggcgctgtggcgtccggcgcgcacggcaccgtccatgtaacctgcccagatgtcagcggtttcggtgcccgaccagaacagattgccgcagggcggacgcaatgcctcgccatgtgtcgtccagaaaccggggggaatcggcgacacgcacgtaatggtccatgggtcggcatgcgcccagtcatgatcgtgataggaaaccggctcgagcgctgcgtcccccagggcacgtgcatagatttcggtctgcatacgcttcgcggcctcgaggtcggtgggggctgcggcattcaaaatgaacgcattgatcacaccgatttcgccgtttggcggcgagttgtcgtatgcccagatgaccggcccaccgacctgaatgatatggccgttcaagcctttgtcgcgccagaaaggccgcgggtagaccattgcggtcttgcgcgccggcgagtgcgccggccaggctcgctgcagagcggcgcgggcttcgggcagcgctggatcgaactgcaggcgttggcacagtgctggatgaatcgccatgatcacgcgccgggcgcggatctcgccctgatccgtttgcagtctgacgatgtcgccgttccagtcagcaattttgcgcacggggcacgacaagcgaaccttgtcacccagcaattgcgccattttgctgctgagaacctgtgaaccgccgacgatccgcgtgccttgcgcgctgtccttgattgaatcgagccgcatgtattcgctgccggccgaattgatcatcgatagaaaatgcaagaagcccatcttcgccggcgtgacaccgcaggtcaggagaaagctggcattccaccctgcgcggtcttgcggtttgatgttttgctgagcaagccagtcgcctgccgagagcttgtccagttcggccactcggggggatttccatggcgcgccgcacggcacatcacgcgacagctcgctgagttttgccgagacgctttcgtcggtaccgaaggtgcctttcaaatcgacggcgacacgtccatcgccaccgaggatcacggtttccccctcatagaaactgggaaaggtgccgacctcaagctcacgggccaggtccgctacggcggtttgtccggggccgatccactggcctccggcctcggagatgtagccggaacccaagtcatgattgagggtgcggccaccgacacgatcacgcgcttcaagcaccagtagcgactcgcaacccgccagatgcaggtcacgggcggcggtcaaaccagccaggccggcaccgatgatcaccacatcaaacacatcgtccgggttggctttgagcagcgcatcggcggcattggccagcccaatgttcaaaccgatcgatcccacggcggcagtggcaccggccagtttgagtaattgcctgcgcttcaaatcaggaggggcgtcagtgctcatgttcgttgcctcacatcacgttattgttggattgaacgcccgtggccgagcgtgggtgcggcagtaaaaaagtggtgacgaaaacgcaaacattcgtttgtctttctgcaggcgaacgcctgccggccccaggacttcaaggtcagcgtcaccacgcaaactcagcgtgttggttctatgagcctcagccgtcaggcatgagggcgcgcaactttgcggttggtgtattcgtccagcagatgtgctcctcccagcgccacattcacggcgcaccactgcagcggttcgggcagggttttcggggttttatgccgcaacgcggcgagcagcggatgctcgataccgccgattctttccgccagcaggtgaccgatcagcgactgcgatgcgacgccgtgtccggagcaacccgcggtatagagaatgttgtggtgcgacccggtttcgcccaccaccggcaacgcgtcgtaggccatgctgacgtaaccactccagcacgcttgaatgccgacaccgcgtaacgtcgggaaacgcacgccaaggttgtcttgcaacgcgcggtaggtcacctcatcgggaatgttcggggttttcgagccgtaggcataacccagccgtttagtggtcatcagcagcgtattgcgtgcggtcaggcgatggctttccatcaccaggtgcggcgtggtcaacccttcccgccctgcccagcccagcgatgccaactgctgtggtgtcaatggctcggtttcgaccgccgacactcgaaatggaacgactttgtcgcgcagaagaccgagttgcggcgtataggcattggtggccagcaccactatcggcgcgctcgcctgcccgcgtggcgtccggcaggtgatcgtcgacccgtcggagtacgactcaagcttggtgttttcatacagcctcactcccgcctgaagtgcagcgcggcgcaggcccatcacatatttgccagggtccagcgtaccgccgtggcgttgcaggcagccaaacagaaaggccggtggaatgccccgcgcgcgcatttgtgcctgatccagaaactcggtttgcgaacccaattcgtggcccacggccatgcttttgcgcagccttttctcctgcgacggatggatgcccgccctgatgatgcccgatgcgttgtagtcgcagtcgatctccaattcgcgtaagcgaccttcgacgtaggcgacagcttcgtcatagaatttgacgattttttgcgctttttccttgccaacacgtttcaagaataactcgaactcaatgccgacgctgccgcccagatagccggcattccgcccgctggcgccgaaaccggcaaacgcctgctccagcaccacaaccttggcccctaacgccgtcagttccagggcggtggacagcccggcgaaaccgccaccgatcacgatgacgtccgcgctgacatcgccctcaagctcgggttgcagatcagccggagtttcgacccagccacccagccgacggaaatgcccgccggcgaagtggctttccagctctcgtgattggtaggtcatggacatgtgatgtgctcctattgactcaggatgtgaatagcgacggctgcttcctctacaccttgcagaccgccaccgttttcctggatggcatgccgcgcaccgggtacctggcgtgcaccggcctccccgcgcaactgggtggtcagctcgtacaactgaccgatccctgtcgcacccagcggatggcccttggattccaggccgccagagggattgatcggcaggcgaccacccagggtgaaatcgccgcgttcggcacacaccccaccctcccccagcggcgcaagcccgaggttttccgcctggatgatttcgcccatggccgaggcgtcgtgcacttcggccacgtgcatgtcctgcgggccaaggccggcgatttcgtaggcttcacgcgctgccaacaggctgacgtgcttgtgcggctcgtcgagcccacgcagggtgaagctgcggatcacgctggcggcgatccgcacacaacgtttcgggtcggcaccaatgcgtttcaatcccgcctcggtacagagaatcgcggcggccgcgccgtcggataacggcgcacacattggcagcgtgatcggataagtgatcggcggcgcggcgagcacttcttcaatggtgaaggtcttgcgaaattgcgaatacgggttgtgcaccgagtgttgatggttcttggcgcacaccgcagcaatctgtcgctgagtggtgccgtaggtcttcatgtgccagcgacacatggcggcatagatggccatgaacttgctgtacggacgattggattccgagcccggcggcaccacgatgccctcgcccattttcaccagcgtcgcgtagttttcctcggcggtggaaacatcccagccggtttcgaacagggccagcgcgcgcgctttgtccggcacgttcattttttccgcacccagcgccaatgccacgtcggtagcccctgagcgcaagctctgcaccgctagatgaactgcggtactgcctgaggcgcaggcgttttcgacgttgtacaccggcaccccttcgaggccgatcttgctgcacagcacctgcccgggaatcgacagttgcccttgcagatgaccgttagtgatcccggcgtagaacaccgcgccgatatcggcgcgcagggcaccggaatcggcgagtgcgccttgcaaggcctccagcgccagatcctgaaggcttcggtccaagtggcgaccgaactcggtcatggcaatgccggcgatgtaaataggttccatcagatcatttccctcagatacgccgctcaacgttttgccagtaatgggcacgcagatcttttttcagtactttgccgaccgggctgcgtggcaatgcatcaatgaaatccacggttttcggcgacttgaccgaaccgagccgggtcttgcacagctcgatcaactcctcagcagtgacggtatgcccggcgctcaactcgaccacggccttcacgccctcgccccattgctcatctggcacaccgatgacggcgcagtcctgcaccgccggatgactccacagcacttgctcgacttcactcgggtaaacgttgaatccgccggagatgatcatgtctttcttgcggtcggtaatgtgcaggtagccgtgcacatcgaaatggccgatgtcgccggtgtgcagccagccatcgacgatggtttctgcggttttctgcggatccttgtagtagcccttcatcaccagatcgccgcgcacacagatttctccggtttggccctggccgagaatgtctccggcgtcgctgagaatttccacccgaaccagcggattaggacggcctaccgatgacaaacgctcgtccgttgcaagacgtccaccgtgcaaatgttcggcgggcggcaggttggaaatcgaggccggggcttccgtctgaccgtaaccgccggccattaccgggccaaaggtctcgatggcttgcttgagcttgtccaccgacatcggtgccgcgccgtacagaaaatacttcaacgagctgaaatcgatcttctgcgccagatccggaacatccagcagtcgatagataaccgtcggcggtagaaaggtctcggtgaccttgtacttcggaatcattgccagcatcagtgccggatccggcttagtaatgatcaccacggtgcctccgcgcgaggtgcacggcagggacagcgtgccggcggtatgcgtcatcggcgccgccgccaggttgaccggcggatgctcatcggcatatgggaaattgatcataaagtgcgcgcagaacgtttggatgctgcgatgagtgttcatcacccctttcggcagccccgtggtgccgccggttggcgagagcgccacgacatcatcgagttgatactcgaccttcggtgccgtggccggctgatccgcgatccaggacttgagcgacggcgccccgggcaagtgctcgtcgatgcagatccacaaccggattttcggcaggctcgaacgcaacgcgtcgatgatcggcgcgaactctcgttgaaaaaacagcacctcgcagtcgaaggcatcgagcacgtgacggttctcttcggcgctgttgcgtgcgccgacgggaatccagcacaggttggcgcgccagagccccagggtgcaggtccaggccaccgcatcgttggccgaccagactgcgcccttggtgccgccgggcaggtcggcggctaacagcgcattggcgatccggctagacaggttgcggacttcggtgaaggtgaacacccgatcgtcctggatgtacgccgcgccgtgcggattgatccgccagccacggtcgaagaaatcaataatcgccatgttagtcacttcacagttgagtaacggttgcgcgggccaggccacgctgctcgaggaagcccagcagatagcgatgaccgaaggctttcgaggccgaggcgaaaccggttctggcggtgtcgttattcaacagtttgaccacggctgcggcgtgcaaggccccggtggcgatgtaaggcgtgatgccatgcacggtggcacgcacggccgtcagttggccacgaccgattgcgaagtcaacggtgcgttgcagagtgctgcgttcacgcggtggcatgctcggggtggtcgattgcacgaggctctggatcaccgcgtcctgctgttctttgggcaggtgcttgtattcggcttcccacttctcacccaggccgtggaccattttcatcaccgggttgtcgtagaagccgacacaggacatgcaactgcgtacccggccatcctcttcgtaaaataccggtagtgaagtgccgccccaaggcaggcagaacacagcttccagcagatcaggacaaaccacgttgaagcttgtgttcggcgcataaggcaccagttccttctcccacaggtaggcaccggggtaacggacgccctcgaaaatggtcgccgttgaaccgacagtcaccccagcggcaccggtacgggggccgcgggtcagggtcgcggtttccagcgaatcgacgcccggtgtttccagggccaattcggcggcgatctcggcgtaggtgtacatgtacgccagcgatggcgatagcagcagcccggcctggcgatacagctcgccgaactgatcacgcaaggctcgaatgtgcgcctgctctccggctggatccagataatggcagccagctttcaaggccgcttctacggcagtcaggccaaaattgatgaacgggccgaccgtgttgcataccacgcgtgcacctttgaacaccgagaccagcgcgtcgacctcgtgggcgcattcaacgatttcgtaagtggccgactccagaccgaccacgcgttgcgccatcatttcctgagcacgagcggcgttgcgagcgacggcggtgaacgggatgtgctggtcgatcaaccagtccatgatcagcatgccggtgtaaccactggcgccgtagacaacgacaggatatttggccatcgggatttacctcatttgttgtttttggatgagtgatgtcgggtgaatgcagaatcagttgttggcccagccttcggcgtacagctgctgggcgagcagccccaggcgcatggtcaggacccggttttcgccgtcctcgatcaatgacgactgggtgtcgcgcaagagtttttcgatcaggtattcacgggtggtgccattgccgccgaacaggcggaaagcttcctgcacaacggccatcgcctcttcggtcaccgtaactttggcggaggcggtggcgtacggatgggtttgcggcgacaggcgcgcgaagctcagtgaacgtcgggcgaccgcacgggccgtttcgacccggcgcaacatatcgcccaggcgcagacgggtcatctggtggtcgatcaatgggtgcccgccctggcggcgctcatggcagtactgcagcgccatttcgaaggcagctcgtgcgacaccggtaaacacctggcccatgtgggtgccggcgaacgaccaggaagaactgacggcgccgtagtagttgtcgcgctcggcgatagcaaagcgccgaggcactcgtacgctgtcgaagtagatttcgccttgaggcaaggatcgttgcccgattttttccagcggcttgcctttggacacgcccttcagatcgagcggaataatcagcgcaatcccgtgcggccggccgttctcatcgtaaaaaccgtcaccgtaatcggcgcagatcaagcccagtgccacctgggcaatgacgccgttggagacccacgccgagctttggccgttgaggatgacttcatcgccaaccaccttggcggtcaggttgccgatattgccgggcttgcccgctggccagtcccgcgtcatgtcgaagatctggttgtcgctgccacggtcgggttgggtggccatccagcagccgatccggccctggcagagttcgaccagttcagcattgccggcggcaacggccatttgcagagggaaaccggcgcagcccaaagagatcgccagtccggcgtcgccccagccgagttcttcaccgatcagcgattcgattcgcaccgccatgtccggtggcaactgcgccaacagcgccgggtcgaggccgagcttggcgaactcggcaaacagcgagtagtaaggcgagccaggggcaaccacctcttcggcggtcatgcgatccagctcgcgacccaatggtcgcaacacttctttggcgaagcggtgcacggaggcctgaatcgcagcctcctcttccgtcagcggggtttcgaaaccggtaagtccggcggctggtagggtgagtgtcgacttgagcgagatcatcaaagtacctccatcgagagtggcagccgctgcgcgtgcaacatgctgcgtcttgttatttgtcatcgactctaacaagcaaaattatttaacgcaacattcgttatgtttattattttgagtctacagagacttcttcaggcacgtgtaaatcggccggaaatcagcagtttgtttgagaaaaatcgcgctgaactgccaggaaaccggcatggcgcccgcctcccgacatccccgcgggtatcagcgctgagaaacgacgcctctgcgggaaaacacgatcggcgagctatccctgttcagcagggtcgccgtgagcgaaaccccgtcgccgctggattgttcatggaaactttggccaccgtcgtcgctgcgcacgatcaaaccgtccagacctacggcgatgactgtttgcccggaaacatcgacggcggtgaccgagctcttgctttgcagcggcacgcgctgccagcgtgcgccatcggcggagccgtgcagcaacgtgccgcgttgcccgcccaccagcagcgagccgtcgcccagcaccgcccccgtccacagcgtgccgctataaccagtatccacatagcgccagtgcttgccctgatcatctgagcgcaataactggccgcgttcggcggtggcgtacaagcgcccttgcccatcggcaaacagccccattaggttcaagtcagcccgcttcgaacccggcggagcttcgagtcgctgctcggtccagttcttgccgccgtcatcggtggtcagcaccagcgaccacagccccaccgccaccccttgctgcggactgaaaaagtgcacggcaaacagtggccgatcttctgcactgcaaaggcgctgcacctgccaggtatcgccgccgtcagcagtggccagaatcgccccccagtgaccaacggcccaaccctgacgggcatcgacgaaggacacccccgtcagaggggtggacaacggcacggatgtcgcctgacggaaatgcccaccgtggtcatccgacaacagcaccacgccgtgatcgccgacggcaacggttcgctccccggctcgggcagcgctcaacagcgtcgcggccgtggcgctggccgtcacggtcgccggaaccgccgacaaggatgacgcttgcaacagcgtcggcaacatcaggaccagtaaaggcatcagttttcgcatgactgtctcctcaatgcaccagtgagccgatcaggcgcactgggcgccgccgcggaaatgtccgctccagccatacggcgaacgcgggtagaacggtcatggccatgatcatgttgaccagaaacatgaaggccaacagcttgcccatgtctgcctggaacttcagatcggaaaacgcccaggtggcgacgcccgccgccagggtgatagcagtaaaaatcgtagcgacgccgacctcctgcaatgcatgctcgacggctttggtaatcggctgtccgagggcctggtgcagctgcagacggttatagatgtagaacgcgtaatccacgccgatgccgaccgccagcaccatgaccggcaaggtggcaatggtcaggccgatctgcagctccttcatgaaccagtagccgatgaaggtccccagggtcagcggcaggcagcagaccagcacggcgcgccaatcgcggtagacgacgaacaccagcagtgcgatagcgccgtagacataaagcatcatcggcagctcgctgcgttccacttcttcgttgatcgccgcgatcacgccagcgttaccggacgccagacgtacactcacgccggcctgagtgaactggctgcgcaaagccttggccgcggcgatcactcggtgaatggtggttgccttgtgatcggcgagaaacaaatgcaccgcggtcatactgcaatcaggccgcatcatgccgggtacccgagccacctcggcggccatcgatgagtagttggtcgggtcgacgggcaccgcgttcattttcgggttgccctcgttatagccctcgttgaactggcgcaggctgttggaaaacgaggtcaccgagaccacaccaggcacaccttgcatggcccagacaaaacggtcctgatattggccgagagcgacgttctcgcagtcgttcgcaccgccatcgaccttgacctcgaagaccacactgagccagtccagaccaatgtcgtaattgctggcgatcgacagcgcatcccgattgaagcgcgcatcctcgcgcagttccggggctccggcctgtaaagaaccgacgactcgatcatggctttgccacgccgccgtgacaaagatcagcacggccatacccagcacccagcgcacgttgtgccattcgctcaaacgggcgagaccgtgcaaccatcgggcacggcgctggcgagaaacttcctcggctgcggcgtaaccgtcctgcaccctgagcatcgaggccagcacgggcagcatcaccaggttggtgacgatcttgaacgccaccccgagtgaagcggtgattgccagttcccgcaccatgggtatcgggatcaacagcaacgtcacgaacgatacgaatgcagtgaccaacgccagtgtgccgggaatcagcaacccactgaaactggcacgcgcagcgccctccaccgacttgccgcaggcgatctcgcgaatgatgaagttgatctgctgcacgccatgggacacccctatggcaaacaccagaaacggtaccagcaccgccaacggatcgaggccatagccgagcagacgcaaagcgccgaactgccagatcagcgaaaccagcgagcaacccaccgccagcaaggtgaaacgcagcgaatggcagtaccagaacaccgcagccgctgtcagcaacaaggccagcagacagaactcgaaaaccgccgaagcgcccacggcaatgtccccgatctgcttggcgaagccgatgatctggatctcgaaatccatgtcctcgaactgactgcgaatctgctgctccaggatctggttgtaagccacatagtccaggcgctggccgttagtatcgaactcgttgaggtcgaccgtgatcatcgcgctgctttggtcgcgagccaccagcgttccgataaaaccaccctgcgccgtcgagttggcgatcatggctatgctcgtatcatcgagactttccggcgttaccgtccctggtaccagcgggtcggcacgaaagccctcttcggtgatttcattgacgaacgcgttgggcgtccacaacgaacgcacactgctgcgcgacacgttgggcagaaagatcagcgcctgggtgacgtcatacagacgcttgagccctgcctggctccagatcgtcccttggcgagccttgaccaccaccgtcaaccgattcgcgccgagcaagtcattgcgataggtctcaaaggtctcgatgtattcgtggccgatgggcaactgcttttcaaacccggcttccatgcgcaactgcacggcaaaccaagccatgcccaaggtgaacagcgccaggctcgccaacgtcagcatgcggtgcgagaacagccattgttcgatgcgcggtaacacgccgcgcgaagtgctttgcttaaggttcagggaactgttcacggcgcgcctcacagggttcgggaaaccacaaggccgacgtaatcgcgatcacgcagcagttgatcgtaaggggtcttgccgcccatgaactttgcgtagttggccgagatctgccagctcgccggattgcgcacgaaattgaggtacaggttcatgctgctggcgtcttcggtgaaggtggccgacaggttcggggtgcgtccgttgatcgagcgcgagtagaacacgcccggcgtgacctgccagccaggaatgagcgtgttgtcataggtcaggctcaaatcgaggctgatgccagaggaggttttgttacccttggcgctcggcgcgatggccgggtccagttgccaggtattaaggccggcggcgatgggttctccggcgtagtcgttatgcaggcccgggtatttcacgaccaccagttcgctcaacaaagtaccggtgctggcaccggtgaattcgagcaaggtcggcgagttggacggcgtcatgctgtagatgccggtcaggtgccattgcagtttctttgcgtctttccagcatttgccaccgttggcggcgcaggcgtcgatgaccgggttgagcggtaccgcatccttggggcggtaggacaactcggtgcccaaggcccagtcgccgaccggcatgttggcgctgatgccgtacatcatgcggtcttccggatattcccaggtcggcgacacggcgaaggtttgcggatccacctgcacgctcagtgacggcagtttgtcgtgataacgcatcacgtacagacccaggttgagatcggtgttgtcaggctgccagcgcagcgacacgccccattggccgctgttgcgcgcctctttttcatcgtacccgtaggtacccctgccctcgcccagcgcatgggtggtggaccaatagctgcccacgggcggcaactcacttttgttccaattgaactgccaatacgcctcgatattcaccccggcaccaagccccgacgccaggctcaacatcggggccggcagcaaggcttccttgagctgggtaccgggacgcgacaatgccatgacatcgtaagcgttggtgttgttgatgccgccagcagcaaacagactctcgccccagttgatcacctgattacccagacgagcgcgaacacgttggtcaccgacatcgaaactcttgctcacccacagatccagcagacgcgccttgaactccagatcgtctcgggcgccgcgggtgaggccgtcgctaccgacaccttcgggccggttagccgatagcgcaccgctggtgtcggttgcggcaaagtcgcggatccagctgccgcgcgccatgaacgtgtagtcctcgggaaatttcagcaccagctcatgggtgccttttatgtaattggtgaacaggtcgccccggtcgtaattcaagtcaccctgatcaccaatcccggcgctgggcgccagacagccactgggtggattgtgcccgccggggccgctggtgataaggttgcagccgcgcgactcggtgcgcagccccatgcccacggcgagggtggagtcgaatgagccgcgaatgttttcggtttcaaaggtgaacgccatggcaaatggggttgcacacgcgatgacaagacctgaggttctactgactatttttttcatgtctgttcccgaaagccgctatcagcgttcgctggtggcgcgcaggttgtcggaggtgtagaagtcgcgtttcaggcgcggattgctcgccccgtcggtcagccagcgatggtcgttcttgccggtgccaatggaggtcatgtcgtacaggtagcgaccgtcaaccaggttgtattgcgcctgggcttccatgtcgcaggtgccggtctcgtacaccgggatcgtgtaaccctcgcggaccttccagatttgcccctgcttgtcgtagtccaccgccatcagcgcgttccagctgtcttcgtcgatgtaaaacagacgcttcggcgcctgatgtcgcatgccttggcggacggtcgcctcgaccacccacacgcggtgcagctcatagcgacgtgattcgggagcgatgaagtcgcgcttggccacctcctcgatcttcgccgagttgtcgtaggccccgaacgagttgtagggcacaagcatttcctgcttgcccagcagcttccagtcgaagcggtccatgggaccgaagaacacgttggattcatcgatggtgtattgattgtccagaccgatttgcggtgcgtcgtaggaatacgccggcatgcgccgcacgcggcgctggcccgggaagtaatagaacgtggtggcttgctcgccggccttggtcgtgaccaccccggcttgtccggccagtgcggcggggtcggtgtagctgaagtaagtggcgacttccagacgatcgaatgacgagaacagcgcgctgcccttcacgccccatggtgtgtacatgaaccagtcggtggaggttcgcagccaatcttcactgcccttgcgtggcgaaatgccggacacggtcttcgacatatcgaaacccacgcctcgatagcgcattttcatgttccacatgacctcggcgcccgagactggaaatggaaacggaatgcccggcacgtaggcttcctgcaacgctaggccgtcgccgtcgagcttggcgaaaccaacgttcttcttggtgttgtccgcgacgaaatccggcacgccgcaactgcgccgcgtcgggtacacgtccatgcggtagcccggaatcttcttgaacatttccacctgcccaggtgaaagcttgctggcgtacttcgcgacgttgcccgagtcgatactgaacagcggtttgtcatccttgaatttccattgctggccgcgcacctggccgtggctccaactgccaccttgaggaccgggcgctgtccaggcgggaatcaccccgtcggcgctggcggcggcctcgcctcccagcggcgtcagtttgctgccgagcaatgcaggatccttgtctgccgcctgagccgtacagaaaaacgctgaggcggcgacggctgcgaccaggtgccggattacgacgccggtagaaaaattgttatgggggcgctcaatcactgtgttcatgggaaggatcctcgtgggccttgatcagcaacggggtcgtcttgacggtggcaacccgttgtctgcgctaacctaatcacatgacttgatcaactgaccaagtcatgtgatcaaagcaagcccggtgccaagatccgcaaggcagaaattagttgtttcttatcaagcgattgcgcgatcaccggaacgacggtgcgaggaaactgccggagaatgttcccgtttgtttcgtcggaacgcaccaatacgggaaataacgaaacagttgttaccattattggtgcaaccgtttcacgtatcgttttcattcatgacgtctggcgatttgttgctgtaggatccgcaagcgtcgacatcgccctcttcgttttcgggggcgccaggaataagggagattgctgaaccatggccagaatgggcgctgaattacgccggcaggatttcgtcgaagcaacgatcagagtgatcgccgagcacggcgtagccaatgccacgacccgccgtattgcggcgcaagccggctgtccgttggcttcgttgcattacgtgttccataccaagaacgacctgttttatgccgtctacgaatcgctgttcagcctcccaccgcaaacgctggaacaggtaccggccggggccactgctgcggcgacggcagccgaagttctgcggcaattgatcacctggttcatcgatcacccggatgcggccagggcgcagaccgagttgttcttctgggcaatgcgcaatgacccgcaaatggccagcaagatttactcggtggccattgaagccaccgagcaggcgctgcagcgtgccatgggaacggagttgagcgaagcgtttttaaaggcgaccagccgcttgctgatccaactggtagacgggctgaccattgcctggtcggcccacggtgatctggatcgattacgagccgaaaccgagactgcttgcactgcgctggccttgttggtggccagtcactgagtcgatccttgcccaggcgccgcatggggatcagatcgcgccaggctttttacagttcatgacattcgaacggtgcgcaacgccgattccgtgatgaacaaaaactgtctcagatgaagtcatttactctatttcggtggttttcgttgcagtaatgagcttttcctgcacaattcggcggattgaaattcgattcgagaccgactgatgaccctgactcctcaagacgaacgactcatcaaggcgctggccttggccatcgttgatcgccctcgggcgacactcaaggaactggctgaagcggctggcgtcagcaaggctacgctgcatcgcttttgcggcacccgtgacaacctggtgcagatgatggaaagccacggtgagacggtgctgaaccagatcaccaccaccaccgacctgttgcacggcgagccggtacaggcgttgcgcagtttgatcaacgagcatctcgcgcatcgggaaatgctggttttcctgctctttcagtaccgccccgacacgtttgcggtcaatggtgagggcgaccgctggcagacttatgctgacgctctggatgctttttttctgcgtggccagcaactgggcgcgtttcgcatcgatgtcaccgccgcggttttcacggagctgttcctgaccatgattttcggcatggttgatgccgagcgccgtgggcgcgcggccagtgccaactcggccaatgtgctggaacagatgttcctgcatggcgcggccggcgcagcgagtacgttgtaagccttactcggttttcctggaaaaaaaagccccgagacctttcggtctacggggcaaaggcggttggatgcgccaaccaaaggagctcttgtcaggcgttatctaacggttgtcggcgtggaccaacctccgcccagcgaacggaacagatcgaccagagcaatctggcgttgcgtgctgacctcgataaacgttgtttcattgacgaaactggtgcgctgcgcatcgagataacgcaggtggctgtcgataccgccttcatatcgggccttggccagactcagggtttcagtgctggtattggccagtgcgcggcgcgcggcctcctcccggcgcaaggtgtcggtggcagccaatgcatcggcgacctcgcggaacgccgtctgaatcgtgccttcgtaggccgccacagctgaatccttgcgggcttcggccagactcagcccggcactgttgcgaccagcatcgaacaacggcagcgaaaggttcggtacgaaactccaggagcgcgaaccgccgtcgaacagaccggacatctgcgcgctggaagtaccaaagctgccggtcaggctgatacgcggaaagaacgccgcccgtgccgcgccgatatcggcattgcgcgcttgcagtcgatgctcggccgcaagaatgtccggccggcgctcgatcagcgtcgacgaggtgtccgcagcgatgtcttgcaccagcatcggctgcgtcgtcagccgctcgggaatcaccttgcccgcgtcctttgtgcccagcagcaaaaccagcgcgttgaacgcctgctgcttctcacgcagattgcgttcctgttcggcccgcgcctgttccaccagccccagagcttcctgataatccagcgctgtcgccgtgccgctggagcggcgctgactgatcagcgcgaacgagtattcgcggctgctcagggtttgttgggtcaactccagccgacgctgggcgccgtcgtgaaccagataggcctggctgacttcagcgatcagcgcgatctgcgcggcgcgggctgcttcttcggtggccaggtattcctgcagcgcagagtcactgaggctctttacccggccaaacagatccagctcgtattcgggcagcgacagaccgacctgatactggctggccacccctgcccggccgtcactggctaggtccgacggcaagcgctggcgattgccggacgcgcttgcattcagccccggaacccgatcggcccgctgaatgcggtactgcgcccgggcctgctcgatgtccaaaagggtctggcgtaacgagcgattgttatccagcgcaacacccaccagacggcgcaggtcgggatcgacgatgaacgactgccacgccaactggttgatcggagcgccctgtttcaacgactcgcccgcccagttgtccgcaatcggtgcgacgggccgctcataggtcggcgccaacgagcaaccggccaacaacatggcgatcaccagcgtagaaaatcctgaaatacgcatgtgtcactcctgagccaaagcgggttgttcaatgggagccggtttactgcgcaacatcgacagcacccacacaaaacagatcggtacaaacaacacacccagcagtgtcgcgctgagcatgccgccgatcaccccggtaccgattgcccgctgacttgcagcccctgccccggtcgccagtgctagcggcaccacaccgagaatgaaggccatggaggtcatcacgattggccggaagcgcagccgtgcagcctcgatcgcggcgtcgcgcaggctgtaacctttttcccagagttccttggcgaactcgacgatcagaatcgcgttcttcgccgccagacctatgatggtgatcaaaccgaccttgaagtacacatcgttaggcatgccagcgaccatcaccgcgagtaccgcaccgatggcgccgatcggcacaatcagcatcacggtcaacggaatcgcccagctctcgtacagcgccaccagcagcaggaacaccaccagaatggccagcgcaaacagttgcgtggcctgaccgctggagaccttctcctggtaggacaaaccggtccactcgtagctgaaaccggccggcaactgcgcggcgatacgctccatttctgccatggcttcaccggtgctgtagcccggcccggcatcaccgacgatgcgcaccgacggataaccgttgtagcgcactacctgcaccggaccttcctcccaatgcgtggtgacgaaagcactgagcggcaccagatcgcccgcgctgttgtgtacgtacagtttgagcacgctttccggagtcatccggtcgccctgctcggcctgcaccaccacgcgctgctggcggccggcattggtgaagtcgttgattacctccgaaccgaaagcggcagacaacgcactgctgattgattcaaaactcacccccagggtgcgcgccttgtcacggtcgatcactacgcgcaattgcggcgactccgccagaccttccatcatcgcgtagagaattttcgggttgccgttggcctgaccaagcacctgatcacgagcagcgagcaacgcttcccgacccaggccggcacgatcctgcaggcgtagggcgaaaccaccggaattgcccagaccgtcaatcggcggcggtggcacggccatcaccgcaccgtcgttggccacggcaaattgctcgttcagcgcattgacttctgccatggccgattgatcttcgccacgttccgaccagtccttgaacaccgggaatgccagcgctgcgttatcgcccatcccggagaagctgaagccggacaccaggaacgtcgactgaaccgcgtcacgggtagccaggtaacgctccagttgttcgccagtcgattcggtacgggtacgggtcgcgcccggcggcagctggacgtcgacgatcatgtagccctggtcctccaccggcacaaacgattccggcaggcgcaggtagaagtaaccgagcatggcgataatgcccaggtacaccaacatcatccggccggaacgcgccaccagcccgttgttcaggactgaatagcgatcggtgagcttggcaaagccacggttgaaggcgccgaagaagccgcgcttttcatggtgcccttgtggaatcggcttgagcagcgtggcgcatagcgccggggtgaacgtcagcgcgaggaacccggagaacagaatcgacaccgccagcgataccgagaactgctggtagatcacaccgaccgagccggacatgaatgccagcggcatgaacaccgccgacagcaccagggtgataccgatgatcgcgcccgatacctgccccatcgctttcaccgtggcgtcgaccggcgacaagccctcctcggccatgatccgttcgacgttctccaccacgacaatggcgtcgtccaccagaatgccgatggcgagcaccatgccgaacatggtcatcatgttcaccgagaagcccagcacgtacatcatcagcagcgtgcccagcagacacaccggtaccacgatcgacggaatcaaggtgtagcggatgttctggaggaacaggaacatcactaggaataccaggaccatcgcttcgatcagggtatgaatcaccttctcgatcgctacatcaacgaaacgcgaggtgtcgtaaggaacggaatattccacatcatccgggaagtaggccgacagttcggccaggcgctgcttgaccgcagttgcagtctggatcgcgttggcgcccggcgacaactggatcgccgctgccacggcgggtctgccattcaggcgcgagttgaagttgtaactctcctgaccgatttccacgcgggcgacgtcgcccagtttgaccgtcgaaccgtcctcgttggcacgcaggacaatacgagagaattcttccggattatccagagtacctttcaccgccagggtggcggtcagttcctgctgactgctggtcggcgtactgccgaagctgccagccggcacttgcacgttctggccacggatggccgcgctgacgtcgtcgatggatagcccgtagcccaccagtttctgcgggtcgagccagacgcgcatcgccgcttcagaggagaagaactgcagcttgccgacgcccggaacccggcgtagctcgttgttgatattgcgcgcggcgtagtcgcccagtgcggtggtgtcactgtgctgggtgccttccttatagttcagcgcatagatcagcaggaaaccagcactggtctgctccacctccagaccttgggtcagcacggcttgcggcatccgcgcttcggcttttttcaggcggttttgcacgtcaacctgagcgagctgcggatcagtgcccggctggaacgtcaccgcaatctcggcgataccgttggagttgttggtcgactcgaaatacagcaggttcttcgcaccgttgagcgactcttcgatcacgctggtgaccgagtccaccagcaccttcgcagaggcaccgggataggtcgccgtcaccttgatctgcggcggcgcgacgttggggtactgcgctaccggtagcatcggaatgaccagcagaccggccagagaaatgaacagcgctaccacccaggcgaagttcgggcgtttgataaaaaacagagacatcggaatatcctcgcggcgacggcgcccttactggtgcgactcaggcgactgagcttgggcttgggcgggtacgaccttggcacctggttgcaggccgctcagtccgctgacaatcacctgatcgccagccttcaggccttcactgatctgccagcgcgaaccctgcatggaaccggtgaccacattgcgcgcttcggcgcggccgtcggcgccgaccaccatgacctgcgcgccgccatcgctgccgcgctgcaccgagcgctggggcacgagaatggcctgtttgtcggtgccttgaggcgtgcgcacgcgcacgaacatgcccggcagcaacacgccgtcgctgttggcgaacttgccgcgtaatgacacctgtcctgtgccgcgatcaacggcgatatcggtaaacatcagtgcgccctgacgctcaaaagcggtgccgtcgacacgaatcgacaacgtcttgctgtcatcagcggagagttttccgtccttaagcgattcgcgcaggcgcagcgcgtcggcggccgactgagtgaaatcaacatagaccggatcaagctgttgaatccgcgccatcaacgtcgcgtcaccctgaccgaccaacgcaccttcggttaccagtgcacggccgacacgaccggaaatcggtgcagtcaccgaagcataaccaaggttcaagcgcgcgctttgcagatcggcctgagccgagcgcgtggccgcctgggcgctgcgcaggtcggccatggcactgtcgaagtcttgctggctgaccgcctcgaccttcaccaacggttcatagcgcttgacccgcgcctgtgcctcaagtgcgacggcctgggtgcgggccaattcaccctctgctcgcgacaaggccgcctttagcggcgccgggtcgatctggaacagcaggtccccggctttgacatccgcgccctcttcaaaacgcttttgcatcacgatgcctggcacgcgcgcgcgcacctcggcgactcgcatgggctctaccctgcccggcaaatccgaagtcagagctagaggctccgtctttactgccagcacctctacagggcgcaccacttcggccacgtccgcttgctcattcgacggcccacacccggccagcgcaatggccgctgccagcgagcctgccatccctatcgcacgcaaatttcccatctctcacccaaggcttgattgaacttggtgcggatgctactttgcaaactctaatgagtcaacattgtctcatatgagaatattgtgatccctgtataaacatcgctaaaggcgtggtgatgacacccaattcccatgatgaacaaatgctcaagtcgctgactatggcggttgtcaatcgcccccgggcgacaatgaaagagctggcgcaactggcgggcatgagcaaagcgaccctgcaccgctactgtgggacacgggaaaatctagggcagagactggaggagtacgccgaaagtacgctcaatctgattatccgcagcgccggtttgcagcatctgcagcccttggacgcgctgcgtcgattgatccgcgagcacttggctcatcgcgaattgcttgcctttcttatggcgcaataccgcccagacttcctcgacttcgaacggggtgacacacgctggcagttttacctggcggcgctagacgagttcttcctcagaggtcagcaaagaggactgtttcgcatcgacattagcgcagcgatttttaccgagctgttcatcaccctggtctacggcttggtggatgccgaacagcgcgggcgtgcagccaacgccgagtcggcccgaacgctggagcaaatgttcctgcacggagcactcgctagtggcgagtttcgcgagcacgccactgtgcaggagaacgcttcagtcctcagaaatgcgtgaaggcatcgctgatgctggcaaccggcgggtgattggcatgatgaacaacattgtggtcagcgggccgtggctgaacatacagcgcacccgaaatcagtgcgatcaccagcaaagcgaacagaaaccgacgcatcgtatacctccatcgtccagccttgggccgaacgcaggtcttttgttattggtcgttcgagtgtggtctcgggacaagggtgaaagctttgcatatcgcgccagagattttgcatatcgtgccaatacttctcaggccaaaggctgtatttcattcgcgaggctcagatgatgtccacagtgcgtggtgttgctttgcttggtttcaaggcgtttgctaccagtcaggggattgatccgatttcggcgctggcggaggtagacctgcccgaagagccgctgaacgctcaaatatctggcgcgcaattcaatgcgttggtccagttatgtgcgttacggtcgagcaatcccttgttcggcttacagttaggcttgcaccaaggcacacaaagtctaggcactctgctgtacgccatgcgtaacgcggccaatgtgggcgagtcgctgaatctgctgacacgctatttccatatacacagtgacggcgcactagtgcgccttgaacgccgaggcggcagtgcccttcttgtgtacgaagtcattgacggtacattggcctcagtacgtcagacagtggagctggcgatgggagttgccgcatgcttgctccgcgaactgctggggcacgcctggaaaccgagagttctgatgttgcgccacagtgctccggccaatcgcattgcctatcgcacactgctgggcgtcactccgcgctttgacagcgccgtcaatgcctgggttttcgatgagtcgttactggccagacctctcggagctacagacgtcaggtgtcaactattagcccagcaacaaatcgacgagttagcgcgtgtaacactgcaagaactaccgtcttatgtgcaaaaaaggctacgcaatgagcttgccaatggtccggtcacgcttcgcgacatggccaagtacatgatgatcagcccgcgcaccttgcaacgctatcttcgggcacaaaacacgcgatttcaggagctgctggacgaaacgcgccagacgatggccgcacgctacctctgcgactcatcgatcagcctgacacaggtggcaggtatgttgggttatgccgacctgagcaccttttcccgggctttcacgcgctggaatggcgtcagcccgcagaagtggaaacagcgcatgcaacaaactcttgggtaaaacatggcgtccaatccattcattcgtgcaatcagtctgacagggttcgatcaatttgcccggcggcagggtttggacccgagccgtatactgcgacaggcctctgtgcctgcgatgtcgctgcagcacccggaagatatcctctcattccaacaatattgcagcttgttgcaaatgtgccggcagcgttcgaacaacgcattgttcggcctggagttcgggctccaccaaggtgtcgacgtcttcggtgatatgtttttcctgatccacaatgctcgaaccatcggcgatgcattgctcgagctgcgcgcgaattttgggcggtacaacggcgcggcacaggttgatttggaggttgtggaaggcgtcgcgttgctgagttatcgaaccgatgagatgtcgattgtcggattgcctcaagcagaagaactggcctgtggtgtcggtttaaaactgatgctcacgttggccggggatcaatggcaacctgaggcggtaatgctccgtcatctgcctcttgcagatgagttgggctatcgccaggcactgggtatcacgccaacattctcagcagcgcacactggtctgctatttgacgcatgcgtgctggcgcaaccactggatcgcgccagcgaagcattacatcagattctcgctagacatctatcaggtatagagcgcttgtcgacagacgtgatgcctggctacgtcaggcaattgctgcgtaacttgttgcccagcggacgtgcaacgatcgacaaggtggccgattgcatggcagtcaacccaagaaccttgcagcgccacttggctcaagaaaatacgtcctttcagcagttgctggatgagactcgccagcaactggcgcgcaattacctggtggttccgacaatcagtcttacagacgtggcgcatctgctgggttacgccgatgtcagcactttttcgcgggcgtttcatcgctggtttggtatgtctgcgcttgagtggtgcaggcagtcgggggtgtgcaggcagcctttattgatcacgagccggatgaaagatcagctttgagcggagcgacccagtccctgcaatggatggaagacgaaccacatccaatggctcgccttgcggcccgcgcgcagctcgtccatgacccgactgaacaccgggcgcagagcctcgacgaaacaggacagattgaacgtatcctgcatgattcgcgcctcctacgataagcgcgtcggtaatctcagttcagcgcacaatccgccgccttcgcgatttctcaaggtcagggagccgccgagggcttgtgccagttgttgggcgatagccagccccaggcccgtgccgccggtgctgcggttgcgcgaattttccacgcggtaaaatggctcaatcacacgggccagctcctcttcggcaatgccgggaccacgatccatcacggtcaccgagaggctgtcgccctcctccggctcgacccgcagctgcgcggcaccggcgaatttgagcgcgttatccgtgaggtttaccagcactcggcgtagcgcgtggggccgcgtgtgaatcactgcgttgcttttgccgctgagctgcacgtccttgcccatgtcctggtagtcgaacacgaggctgtcgaggaatgaatcaagatcggtacggcggctttcctcggtggccccatgcacgctgcgggcataggcaacgccttcacgcaccaggtgttccatctcgccgaggtcgttccacaatttgtctttgtcgccgcagtcgtccatcaattcggcacgcagcttcatgcgcgtgatcggggtttgcaggtcgtgggaaatcgccgccaacagttgcatgcgttctttcagataggccgcaatgcgcgcctgcatggcattgaaggcgatggcagcgtgtgcgacttcggtcgggccttgttcatccagatgcaccgggtgagtgttgggatcaaggttttccacggcctgggccagccgggtcagcgggcgtatggcaatgcgcacagccagccacgcgcatagaatcatcaaggccagttggcccagcaaaaccaccggcagccacggcgacaacggcaccatcgaggggcgcacgtcgatggtcaccgggctgccgtcggccagtttcagatggacctggaaatgtttgataggcccgggaatgtctgtcacggtcatcgggtaatccttgccgatggcctccttgatcgaggtcactgcaatcggcgtgtcacgcagagcgacgcctggcgagccttcgtcgagcaaatagcggtaattgcgtcgatccagttgtttcaaccaactcatgcgttcctcggcgggcaagcggtcaaggatggcaatggacgtcgacacatcggtttccaggttacctagcatggtgtttttcgcggtttcgtaacgctcgtaatactgcacgccgaaggacaaggcctgcgccagggtcagccctaccagaaagatcaacgacagccgcgagataagggtacgaggccaatgcagcgaaggcttcatgccggtgctccaagcacttgcaccggcagcgagaagacatacccctcgctgcgtacggttttgatgtaagccggctcgcgggcatcgtcaagcaggcgttggcgcaggcggctgaccagcagatcaatggaacggtcgaacaggtcggcgtcacggccctgggtcaggttgagcaactggtcgcgattgagtacccgttgcggatggtcgaggaacacccgcagcaggcgatattcagcgccgctgagggcgaccatggtgccgtcttcatcaagcagatggcgggcggaggtgtccaggcgccagcgcccgaaccccagccaccttccggtttcggtaacgaccaggttgggcggcagcatgcgcgtacggcgcagcacagcgttgatgcgcgccagcaattcacgggcggcgaacggcttgaccaggtaatcgtcagcgcccatttccaagccgatgatgcggtcggtttcgtcgttgcgggcggtcagcatcagcaccggcgtggccttgtgtttgccggcgcgaatgtcgcggcagagcaccaggccatcgtcgccgggcatcatgatgtcaagcacgatcaggtctaccggcgtggcctcgagaaacgagcgcatctggcggccatcggcaaccacggtcgtgcgcaggccgttcttcttcaggtagttgcctaccatctctcgaatctcacggtcatcgtccacgatgaggatgtgatcaacgtgttccatgggccaagcctctgtcaatgggaattgcggctcagtctatagaggctgagtccgttcgcccgcggcggtttgtattgcagtgtatctgctctggcaaaggatacatgcagaggcaaaaacaacaatttcctaggttttgtatggctgtgtatcggggcggggtcctgatacgaaccgatttatctgcgcctgtttttgacacaggcgagatacctcgcgggcttctaatgagccacatcgaggccaacccaagcgcctcggctcaactgaacgacccaacccttgaagccttgaggaaacgaccatgaacaccaataccctctatgccacttgcctgtttgccgccctgaatatctgcaccttctcggcccgcgccgaagccgacgtcacgccgcagatttacacctacggcacgcacttggacatccagaaagtggtggcattgacacaggatgccggggcggcctgcggcattgtcgatgcccaactgacctacctgaactcgcagggcaagaccgagatcctgaactaccgcaaatttgccgagtgccacagcgataactgagcccggcccacatttcatcaggagacccttatgttcctcatcgcattcctgggcggcttattgaccgtcctcagcccttgtatcctgccggtcgtgccatttctgttcgcgggtatcgaccgcacacgctcatcgatcctgcttacccttggtggcatggtcctgaccttcgcgctgatttccagcctggccgtggtcagcagtgaatgggtgattcaggccaacaacaccgggcgtcatgtggcactggtggtgatggcgctgtttgccttgtcgctgatctcggcgcgaatcagtggctggctggccagcccgttcgtgttactgggcaatcgccttgaccccaagacgcgcaaaatgtccgggccgctgggttcgctgatgatcggcgtcgccacgggcctgctctgggcgccgtgcgccgggcctatcctcggggtgatccttaccggcgccatgctgcaaggcgccaatgcgcaaaccagcctgctgctggtggcctacggcctgggcagtgcactgtcgttgggtaccctgattttcgccggacgcggtttagtcaatcgcctgaaggcctcgattccggtcacaggttggctgcggcgcgccaccggttttgcggtcttggccgcagcgctgacgatttctaccggtgccgacaagacgctgttggccggggcgtcgtccgaaggcgtcagcgtgctggaaaaaggcgtgatgcaaagcgtccccaaagtcgtcgagtacctggtaagcaaggccaaggccgaacccaccctcgacaacgcccaaggcccgatgccgtcgctgtccggcgcggtggaatggctcaattcgcccgcactgaccagtgaatcgctcagaggtaaagtggtgctcgtcgatttctggacttacgactgcatcaattgccagcacaccctgccgtacgtgaaggactgggcgcagaggtacgagaaggatggcttggtggtaatcggcgtccacaccccggaatacggttttgaacgcatcatcagcaatgtcagggatcaggtgaaaaagctcggcatcacttacccggtagccatcgataacaactacgcgatctggcgcaacttcgataaccagtactggcccgcgcactacctgatcgacgccaaagggcaagtgcgtttcacccacttcggagaaggtcgctacgagacgcaggaaaagatgattcagcaactgctgcaggaggcgaaagctccagccgcgtaacccttgaaaatccatggcccacaggcaacgcgctgtgggccattagctttttctgctgtggcctgggttgcgcgaccacactctcccacccaccccaggctaatcggacacgatgcttttggcctcaagaaatgcttgcagcccaaagactccaaactcccggccgacaccggactgctttaccccgccgaacggcgccagcagctctggcgaaattctgttgatcaacaccgagccgacctgcagctgggtcgccaggttgggcacggtccggttgcccgcgataagcacaacgcccggtatgcccaggcgttggccgcgtcgaatacccccctctcccgcgtttcagcgttgcacaacttcaaaacgaaacccgccgtgcgacgtgcaaaactcgcctcggcgtagagtgctggaaacgccgcttcgcctttggcgtgtcatttcgccgtagcggctttttcgatgaggcgggcaaccggttccgggttcgaaaccatcaccacatgggaagcgcccttgaccacttccacggctttggcagcggcgcgcttggccatgaatgccatggcttgcgggggaatgttcttgtccttgtcgccgtagatgtaccaggacggaatatgcttccaggcagggctgccggacgcttcgttgagcgccgcttccgttaccgggcgttgggtggcggccatcaatgccgcctctttcgcggggacgtcagcggcgaactggttgtgaaacttgtcctgctggatgtacaagtccttgcccccatcggccagcggtacaggcgcagccagcgttgggcccagcgtgctgcccgggaatttgccggccagcccggcgacggtttccccggcctcaggtgcaaacgcactgacgtaaaccagggctttgacgtttgcatgatcgttggccgcatcactgataacgttgccgccataggaatggccgaccaacaccaccggcgaatgaatgctcgtcagcaatgccgagattgccgaaccatcgctctttacaccgcgcaatgggttggcagcggcaaccaccgggtaaccgtccttctcgagaatcgtcaccacgccattccaactcgacgcatcggcaaaggcgccatgtacgagcacaatcgtgggtttttcagtttgcgaccaggcgtgtgtcgccatgctcaggctgacggcgacggccagtgcggttaatacttttttcattgttaactccgggtttgacgggaaatcagggagcgaagcgcgtgaagacaaagtcgtgattgcgcacacgcgcctggtgacaggcgaagcaggttgcgtgttgggcttcatcggccggtttaccgttgataaaccgcccgaatccccaaccaccggttgctgcatattttttcgagtccttgaccatcacctgcacggtcgtggccggccccgggatggacgccggctcgaattccggggactgcacatgtttccaggccagctttaccagcaccgtgccgtcggggaatggcagcgttgaatcctgataagccttgatggccaagtcattgcccagcacggctcgcagttcgttcaggggggccgcttcctgcgcaggcgcaatcagcggccataggcggtagttttccggcaatttcacgccatagatcggtgaggcgtcgcccgaggcgacaccggtagcggtcaacgctgcgattgcaatggcagccgacatcgcggccagaaatttcagcttcatcatcgccctcctctcagccggttttcaaagatgatcggcgtcgatcaccgcctgggcgaaggctttcggcgcttcctgcggcaagttgtggcctacaccaccggtgatcaatcggtactcatacttgccagtgaagcgcttggcgtacgcttcggcaggtgggtgcggtgcgccgttcgcatcaccttccagggtgatggtgggcacgctgatggatggaaatgccgcgagtttcttctccagcgcgtcgtatctggcctcgcccttgaccaaccccaggcgccagcgatagttgaaaatcgacaccgccacgtgatcagggttttgcaaggacgccgcgctgcgctcataagtggcgtcgtcgaaattccactgtggcgacgccagcttccagatgagcttggcgaagtcatgggtgtttttctcgtagcccaggcgaccacgctcggtcgcgaagtagaactggtaccaccactgcagttcggcggctggcggcaatggcaccttgcccgcctcttggctgcctatcaggtaaccgctcacagcgaccagggctttcactctttccggccacagtgcggcaacgatatctgcagtacgggcgccccagtcaaacccacccagcaccgccgtcttgatcttcagcgcgtccatgaagtcgatcaggtcggtcgccagcgcagcaggctgaccattgcgaactgtcttgaccgagagaaaatgcgtatcgccataaccacgcgcggaagggatcaacactcgatatcccttgtccgccaaagcaggagcgacatcagcgtatgcgttgatatcgtagggccagccgtgcaacaaaacgaccacagggccatcggctgggccgagttccgcgtaagaaacgtccagcagccccgctttcacatgcttaagagcaccgagaaaggtgtgagctcccggggtgatagccccaatggtggacgcgggcacatcagccgcgctggcttgggaaaaaccgacagccaccgccgcgaattgcagcaccgctgctgccaacagcgatggggcaagaccccgcaggcggctggatttattttgattgttcagcaaggtcatctccatggtgtttctccgtagcgagccgccgaatagcggcccggtgtgttggctggattgcgtgtgagctactgggctgtcttcgttgcgctcagcttggcgcgcagcggccggaaggcctcccgcaactcttcgctgaacaattgaggttgctcccaggaagcgaagtggccgcccttgttgacctggttgtagtaggaaagtgatgggtaagcgcgttgcgcccagctttttggcgcctgatagatctcgtgcgggaagaccgtgatcgccaccggcaccttgatgcttgcggtgttctgcgcggcagcgctgaaattgttgttgttgttttcccagtagaaacgcgatgacgatgcgcctgcgtccgtcagccagtacaggctgatatcgtccagcatctcgtcacgggtcaatacccgttcaggctggccatcactgtccgtccacgcggcgattttttcgtacatccacgccgcagttccggtaggcgaatcggccagcaggtaaccgatagtctgcgggcgcgtcaccatcatcgcgccgtatgctgcattgcggccgaagaaggtgctcaaggaatcaaacgccttgcgttcaggctcagtcagcccgtcaggggccgggtcaccactattgatcggcttgaccaattcgggcgggatggtggccggcatgttcaagtgaatgcccaacagccccggcggattcaggcggcccaatgcatccgatatgaccgaaccgtgatctccgccctgggaaacatagtgggtataacccagacgcttgatgagcacatcccaagccttcgcgactcgatccggcccccaacccaattcagtcggcttaccggaaaaaccgtgtcccggaatcgatggaatgatcacgtcgaacgaatcttcaaccctaccgccgtaagcaacgggatccgtcagcgggccgatcgtcttcaggaactcaaactgtgagccaggccatccgtgtgtcagaagcagcggcatcgcgttggggtttggcgagcgaacatggatgaattgaatatcgacgccgtcgatagtcgtgatgaattcaggcagcgcattgagcttcgcttcagccttgcgccagtcatagccgctgccccaatacttcaccagcgcctggacctgggccaactgcacgccttgggacacgtcatggacggtttctttgtccggccagcgggtcgccgcaatgcgctttttcagatcggtcaattgcgcttcatcgacgtgaattcgataaggtctaatcgattcgggactggtcgaggccgagctggcaactgacgcatcggcggccgggccagcagccccggccgcaccgctgccggctatcagggccaaccccaaagcgcccattctcacggaagaagccagacaatggcgccaggtgaaaccgaacgtagctacaggcattttgaatttcctataagtcattggtcgacaacgtcgcgaaacgcgcagagatagccgcgagttaaatgagtcatccattggagaaggtttgcgccttctcgatgggttcatttaaagccccgctggtatcccgtatgtgtcatcaaccgacttaaaggaatcgctgtgtatctatccaaagcgcagatacaaaacgatacaaatgcgccaatcgctgctaaagacagggttccacgtcgtgatctaacccctgcccattcacgccttgatcgatttgggtatcgcgatacggctactggtcttaatttcgcgtaaagccagactggactggatggacgcaatacccacctggcgcctgagcacctgctcgataaagtcactgtagctatcaagatcctctgccaacacttgcagcacgtaatcggcatccccagtgatcttgtgacaggccaacacttcaggcagttgagcaatcactgcctcaaaagcatcgggagcgtggtcggcgtgggtggaaaaacggatgtgcacgaacgccatgatatccagccccagcattcgtcgatcaaggttcgcctggtagcctttaatcacacccgcctcctccattctcttacgccgcctccaacaaggtgtcaggcttaatgacaagcgctcactgagctcagagttggaaatacccgcatcctcctgcagcaacgcgagaatcgccaggtcggtgtcgtcgagactgatgcgtttggatgtttttttctgcattacgtcattcctgagtaaaaatgcccgaataatccagtaaaccacgaaaacaaagcaaagaaagcgcatcagagccggaacagaatatttgcactggcccatatcagcggatgcgcacaatgtttacagttttcagtgattcccaccgtttgcaccacggcaccgaattgaaagacggcgtgctcaagccgtccttcgaacagcccagtcgggccgataccgtccaccatcgggtcaaacaggtaggtcttggccagatcatcgaaccgcgagcatttgatcggtcgtgctatgtcaacgcgcacagcgagcgctacgtaacatttctggaatctgcctggtctgaatggtgtgcaaccgggcgcacccacgatgccttgccgctggtatggccagtgcgtgatctggccaacgagcaagtcccgacgttcatcgacggcaagctgggtttttacgccatggatgccggctcacccattaccgccaccacctggcaagcggtaaaaaccagtgccgatatcgcgctgaccggactggcgctgatcgatgaaggtcacgacagtgcctttgccctatgccgcccacccggccatcacgcagcacgtgaatacatgggcggctattgctatctgaacaacgcagccattgccgcacagcaggctattacccgaggcgccaagcgtgtcgcggtattggatgtcgactttcatcatggcaacggtacccagaatattttctacgggcgcagtgacgtcatgtttgtctcgctgcacggcgaaccgacggtgtcctatccgtactactcaggctacagccacgaagtcggcgctggtcacggcgaaggttacaacctgaactatccgctgcccaagaacacctcttgggaaagctaccgcaacgccttgctccacgcctgcaagaaactccagcaatttgcccctgacgtgctggttatttcactgggcgtcgacaccttcaaggacgaccccatcagccactttttgcttgaaagcgaagactttatcggcatcggcgagctgatagccggcgtgggctgccctgccctgtttgtgatggagggtggctacatggtcgatgaaatcgggatcaatgcagtcaatgtgctgcatggttacgagagcaaacgggcctgaaactccgcaaaccactatcgtcagtagccattacctctctatcaaggtcatgtgattcccacttttctgccaaaactcaaaaacataaaatcaagaggttttgtaatgaaatcgactccgtccgagcgggttgaacagcccgcgctgcagcgcacactcagcaatcgtcacattcagttaatggccatgggcggtgctatcgggacaggtctgttcatgggttccgggaagatcatcgccctctccggcacgtcgatcatcctcatctatatgatcatcggtctgttcgtctacttcgtcatgcgtgccatgggcgaaatgttactttccaacttgagcttcaaaaccttcgctgattttgccggtgcctatcttggcccacgcgcagcattctttctcggctggtcatattggctaagctggagcgttgcagtgataggtgacgcagtcgtggtgggtggattttttcagtattggttccctgatgtacccgcctggataccagccatcggcatgctgataacactgtttgccttgaacgtgctgactgtcaggctcttcggtgaagtggagttctggttcgcgatcatcaaaatcattgccgtcgttgccctgattggggtgagcatggtgctgattgccagctcctttgtctcacccagtggcgtcaccgcgtccctgaaccacttgctggataaacagggcgcattccccaacggcttgttcggtttctttgccgggtttcagatggcgattttctcatttgcgggcaccgagctgatcggcaccgcagccgccgaaacgcgctctcccgaaaagactttgcctaaagccatcaactcgattccgctcagaatcatcttgttttatgtgctggcactggcctgcattattgcagtgacttcctggcaacaggtttcgcccaacaagagccccttcgtcgagctgtttctggttgcggggttccccgcagcggccggtattgtcaactttgtggtgctgacatccgccgcctcatcggccaacagtggcgtattttcatccagccggatgctgttcggactggctaatcaggacaacgctccggggattttccggcgtctgtcgagcaatagcgtgcctctgctgagcttggcgttcaccaccttgttgatgctgctgggcgtgttgttgctgttcatcgttccagaagtcatgaccgccttcaccatcgtctctaccgtgtcagcaattctggtgattttcacttggtcgacgatcctcgcgtcgtacattgcctattgcaacaggcgtcctgacctgcatgcaaaatcgacctacaagatgcctggcggcgcaccgatggcctggttctctttggcgtttctgggctttgttctttgtctgctggcgttgagacccgacacccgaattgccttgatggtcatgccggggtggttcatatggttggcaattgcttaccagttgacctgttccagaaaacccaagcctgctgacagttcggcaaatcaatacaaacgcgaaggcttggtttaagggctatggcttaccgccctcgtacctcctggcgcggaactccaaggagtacgagggaaatcttgctgaggttcagcgaccaagcaatctcttcagcaccagcagagcaaccgccccgattgccagtgcagcaaccggcttctctttgacgaatgtagaaacgctgtccagtgcgtcgccataggtttgcgtcagttgacccgcagcttggcgtccagcgccttcggcttccaacttcgaatcgccaaaaagcttcccgactgcgctctgcgctttgccagcaaccttttctacaacgccttctacctgttcgctcttcatgattaaccaaaccttcgtgtgtgattgggtaacccaggaaaaccccgggcttgaggcaacgtgcaaagcgttaggtggacaggcttagtgattagttcaaagttgatgaagctcacttggtccagatcaaccgataagccttcttgcctgtagcggcatcgtgatagggatcttcgcccgggacctctcgcgtgcgcacgcacgggcgtccctcgcagtcaataatggcagcgtcaccaccctggcgtttcaacgcttctatgttttgctcaagcaccgctaactctcgttgcctttgcgcaatctcatcggtgctggggaccgcaaagaaaaacagcaacgccagaggcaataccacacctagatgaatggcgaagatgctgagccagaatcgacgcttaaggctgtcactggcggcctggtacttttgcgccgcatcaagcgccgcggcatcggcctgtttgaacttgccaatcaagtgctcggccgcctttgaagccactgaatctgcgatctgcgccgctgaagcgcccagtatcgtcggaatctgttgcaggctctgctcaacacgtttttccagatagccaagacgcgcaatcgcctgctcagcggcttttctgtcattttccgctgcgctcatgatgcccttggcagcgacggccatggcccgcaggctccggtcattctcgttcacgtgttcgtccatgggtcattaccttccatattcggggccgtcgcggtgtttgggacgcttcatgcttcgctccaatgcaggcacagatcgctccagctgcggaccgctcatttccagctccagccattgcctgtgcggcatactcaaatcacagacgtctcgcagctgaacaaaatgcattgctccacctgcgcccatgaccagaagcacaccacctgcgcccaccgggtcgtcagcttgaatattgcgtaaaaatcgcaggtatatctgtgaacgctcgcgcatcatcgggtcgaggccgcgaacagcttcgcgcgcggtttgctccacgagtcgttcaaggcttcccgcggacaacgccaagtgttcgtcgtcgaaggcgtccagataaggcacggctcgcgaaaccagaggcgtgtcggtgtcattggcgcccacctccacataccagtgcaggcttctggacgtttcgaccaatacctgattttcacctgccagggcggccagtagtaaacgatgtcgcagtcgttctttttttaggctggcgcccttcatcttgaattcgatcaagcgcacgacacctggaaaactcagcagtacgtcagccagctctttgtctgcaggcgtctgctgtagcaggttgaccacgcttgggatcgaggtgtttgcgtctagacatgaccgcacggcgaatccgagaccgtacaggaagtttcctatcacgacgttttcatagagtttcttcgttcggtgacgtttgttctgatgaccaacatcatcctgatcttgctggttcaacggcactccgttactcctgatgcttgggatgaaggaccttatatatctgcaaaaccacccgcctcactgcctgttcaatcgtaccttcattgcgacacatgacccacccctgctccacagccgctcgctcaaacgcctcggtacacgcaacttgctcctccagcttagacatcaccgtactgctcaacccccgccgtcgtgctgccgcccgcgcccaggatatttgcgccgcggtgacaacccccacgtgcaggtccggcacttgcacctgtcgattaatgttcagctcaagaatgtctgcaaagggtatcaaccgacgaaacccagcatcagacgggtaccagcgatccatcaggatgatgctgtcaggtggctgcgcggccagtacgttttgagtaatccagctgcggctgtcggcaaagcgctcacacacctcaagttccagatcccggctgggatctcgggcgaacgtgttaaccagagccatcgtttgcgctcgacagggatcgctcttgcgctcgcacagtcgcacgacctttatgttgtcggccctcaacgctgtcgtaacggcctccaacagcgtggttttaccggtgcctttggggccatccatcgaaataaacagcgcacgagtcatacgggcgctgcatcatcgttcaggttgtgcagttccatggagcctcggggtctgtgcggttgggcgagttggcctccattatgggcaaccctattgcccaatgcgaggctggactggccgacgtgccctccccgcgtcgacggtcagtcgttcagcatccggctttcctgcacaccagcctcatacctcaaggcccatggcgcaatcaaccgctgcggggtctggcaggctttgcgtttaaacacgaagttgcggcatttctcggcaaactgctggcggttttccaccatgtcgagtcgcatctgtgccagctcctgctcgcgacagcgttcaacttgccgagtatccagcgtggctttacgtgtgcgtgcatgaaggtacttatcatcggccaacgcactgtcggcctgttgcaaaagccacaagccaaatgcttgtgggctacgtggtccgatggcctgaaccatgccgtactgctgggcctgaatggcactgatgggcaggcattcttcagtgagtttgtgcgcgatttcactgcccacggctcgtggcaggctgtaggtccagtattcggagccgtagagccccatggtcttgtaatgcgggttgagcactacgccttcgcgggccagtacaatgtcggccgccagcgccagcatcacgccgcccgcgcctgcgctgccggtcaggccgctgatcaccagttgcttggcggtgagcagctccaggcacacatcgtcgatggcttgaatgttggcccaggcttccagccccggcacctcggcggcctgtatgacgttgaggtgaacgccattggaaaagctgccgcgcccgcccttgatcagcaacacgtgggtatctcgcgccttggcccagcgcaatgcagccaccaggcgctggcattgttcggtgctcatggcgccgttatagaactcgaacgtcagttcgccgatgtggccgaactcttggtagcgaatcggttgatagacccgctcgttgagcgcctgacaggcgattgaactgtccagcaccggcacgccggccaactgctcagccagaacatgccgtgctggccgcttgaaggtctctgggcctttgggcttgagcgagccgatccacaggctgtgatctccagccgctaccaacacggcgtcgtcctgtaccgcaaggatttctcctggggtgccctgccgggcgtccaagtgcgcgtcatagacgtaatactgaccgcccaacaggctcgccaacacgccgggctggccatcggcggcgtcgatgctgcgcttgataaagcctgcgcaatcgaaccaactgaaggtgcggtcagcctggctcatgtttggctgcaagcgcccgatgacgctgggttgggtgtaatcgagcggtgtcgggacaaagcctttggcgaatttcgccacgacgtcacggatgcaaaccatcgcggcgtcgctcaccaggccgttgtacagctcggatttgcgcacctggtcgggcatgtcgaactcacaggtggaccagatcggcccggcgtccatttcctccaccgcttgcaaggcggtgacgccccaacggcgggcctgccgggtgatagcccaatccagcgcactggcaccacggtcaccaacgatgcccggatggatgatcaccaccgggcgcaggggatggctccacagttggtgcggcacacggtccttcaaaaaggggcagatcaccaggtcggcgccggacgcctcgacttgctggcacaccgtggcttgatcggtgaataccacaacactggggtcgtgacccgcctggcgcaaatccagccaggcccgttgggttaaaccgttgaatgccgatgataacaacaggatcttcagtgatcgcatggctgactcttccttgagaatgtgtgaccagagctgctcgttgagccgtccctggccatcgataagcgcccaaggttatagagcgagccagcctcaccacctgatcgagatcaatagatgaaagcggcttattttttctgaatcaccgcgcaacccactcatcaaatgaacatgccctgctcaggtacgccttgttaaccgtaacggagccacgttcatgttcgagaaaccgcattacctcatcagtttcatcctcgataaccagccacaaagccgcacgcttgagcacgatgccgacacgctggatcctcaatgggccgagtccctgctcaggcagcgctttgcagagctcaaggacgcgaaattgagcgacgtccaggtgcaaaagcgcaacaagcccgccgacgaaggccatgacattccggggcattaccagcagccctgatttatgaaaacgggggctgcatcgtggttctacggtcgtgcagttgacagcccccggcaaaactcaacaacctgcacgtctcaccgccctgccctgaggctgcccttggactatttcaccgcgctcaccgccttcatcgaagccgcagaaggcaacaatttctcgcgtgccgccgagcgcttggggatcaaggcctcaacggtttcacgctatgtgaaggaccttgagcaagacctgggcatcgcgctgttcaaccgctccacacgcacgctgcatctgaccgaaggcggccagaccttcctgatacacgcacgcagggtgctggacgaactggaacacgccaaggccgccacgtcagcgctgaaccagcatccccggggcgtgttgaaactcaacctgccaccggcgtttgctcgccatcacatcctgccggcgttgaatgactttctggtgcgctacccgcaaatcagcgtggaactggtgctggataacacccaggtcaatttgattcatgccggcgtcgacttagccatacgcattggcgagctggccgattcgacgctcaaggcacgcaagctcagcgacggccactaccgcttggtggtcagcccggcgtttggcatgcagcaccctcctccgtccacgcccacggacttggccggtgtgcctgcggtgctgggcacggctaccaccggcgatatcagttttgtctctgccggccgcgcgctcccgctgctgcatgacggcgttattcgaatcaatgacctggatgcgcaactgatcgccgtgcgccaaggcttgggctttgcgctgttgcccgactggctggtggcgcgaagtatcgaggccggcgacttggtagtgtggctaccggaatggcagatccagggcgtggagcgggcgtttgcggtgtggtttgtctacccgcccaagcgcattgtgtcgtccaaggtccggtgttttatcgactttatcgttgaacgactgggcgaaacaccggactggaagtgactcaactgaagcggatatccagcgcacgcaagtaggtttgcagccccgcatcctgaatcgggatcaggaacgcctcgctatccgattcattaaaatgcgcatgccagtaacccggtggcgtgacaaacgccaggccgggagaccagtcgacccgctgcgggttacgaatttgcccatccgcgcccagctcggtgcccaccaatgaataacagcccgtggggcaatcaataatgaagtccagtgcaatcgactgatgccgatggggtttctgcaccgatcccgccggcagaatcccgtacatggcccacagcacgtgggtcaccgtgcgcgtctgcgggaaatgacggttgcccagcaggatgctgatgcggctgcggtcctgtgccctgggatcatcggccgcttcacgcaacttcgcgttggccagtgctgctgggtacagggttggcgcaaagcgatcggcgcggggtgtcacccccaggtaacgcagcaacggctcatcgtgaacatagtaaagacgtgcatcctcgcgggcactgaagtgcgcttgctgtaatcccggcagggcgataaagcagcccttggaccattgaatctcatactccccctgaaccacgctgccctccccggcaatcacgtagaacacctgggaagtggcgttgggttgcagggtcagcgtgccgccacggttaaggcgcatgaagttcgcgcatagccctgggcctgtggcggggccttcgcagcccaaggcgtcgctgaggtccagcggtaccacgcgggaggggccactgtcatacagcgaggccggaaagctgtggtagggaatacgggaaatcaggttggcactgatgggatttgccgccttgctgtactcgaagtactcggcgtccacttggttgatatcagtcagtgcggggtcgaattcacggttcatcaggctcacctcagtcttgggctggatcgcgcagcacggttgaagcgctgcacgggctaagtggactataggcattgcccactggcggatgaatgcctgtaacggcacagcagttatgcgaaacggggcagttaacgcaattggaaccaggtggttttcaactgggtgtacttatcaaacgaatgcagcgacaaatcgcgcccgaaccccgactgtttgccgccgccaaacggcacggtcacatccagggcgtcaatggtgttgaccgacacggtaccggcattcagggcacgcgccacgcgatgcgcacggttcaggtcatcactccacaccgatgccgccaggccgtagaggctgtcgttggcttgctgtatggcctgttcttcggtatcgaaggcgctcaccgccagcacaggcccaaacacctcctcatgggaaaggcgcatttcagcggtgacgttggcgaatatcgtcggctggatgaagtttgaacaaccctcaatgttcaactgttggccaccggtcaacagcatggcaccgtctgcgtgcgcctggccgatggcttgcatgatgcgtgcggtttgcccgctgtcgacaattgcaccggcggcgctggcggggttgagtgggttgccgggcatccaggcacgggatttgtcgatcaaacgctcgatgaattcgtcgtggatgcagcgttgcacatagaggcgcgaattggccgaacacacctcgccctggttgaagaaaatcccaaaggccgccttctgcgccgccaggtccaggtcctgacagtctgcaaacaccaggttcgggctcttgccgccacactccagccacacctgcttgaggttggactgcgcggagtactgcatgaagtacttgcccacttgggtcgagccggtaaacaccaggcaatcgacgtccgggtgcaaccccagggccttgccggcgccctcgcccaagcctggcaccacgttcagcacgccctcgggcatacccgcctccaacgccagttgggccaggcgcagggcggaaaatggcgattgttcggcgggcttgagcaccacgctgttgcctgccgccaaagcaggggccagtttccaggcggccatgtccagcgggaaattccacggcaccaccgctgcaatcacgcccaatgcttcgcgggtgatggtcgccaacgcgttgtgggcagtcggcgcgacctgatcgtaaattttgtccagggcttcaccgtaccaggcaaaaacatgggccgcgccgggcacgtcgacgttataggcgtccattaccggcttgcccatgttcagggagtccagcagtgcgagttcttcgcggtgggtcatcaacaggtcggcgagtttgatcaggacttttttgcgttcgcctggaggtatgcgtcgccaggggccgttgtcaaaggcgcggcgtgcggagcgtactgccaagtccacttcaacctcaccgcagacggcgacacgtgcaaggagctggttggtcgccgggttgatggcgtcaaaggtcgccccggacagtgcggcgacggcctggccgtcgatcaaggcggtgttgatgaaggtttgacgggcagcgcgttgctgccagtagtcgaggttgaacatgctgtactcctgaattggactgtaaggcttttgtaggagcgagcttgctcgcgaaaaactcacaggcgccgcgttcatccaggaagcacgcgttatcgttgacgtttttcgcgagtaannnnnnnnnnnnnnnnnnnnnnnnnnnnnnnnnnnnnnnnatccaggaagcacgcgttatcgttgacgtttttcgcgagcaagctcgctcctacagatgaaccgaggtggggcctgtttattcggccatttgcaggtccggcatgcgtacccggaaccctcgggtgaggcacagcaaacacagcagccccagggccatccagcacaggccgatggtgaacgacaggccggacaggctcgtccacaaccatagcgtgctgagaaaccccaggcccggcagcgcggcgtacagcagatagttgcgtgtaccgtgcagcttctggtcgcccaggtaatgcttgatcacggccaggttcaccgccgaaaacgcgaacagcgcgccaaagctgatcatgttggccacggtgtccaggctgataaacagcgcaatcagcgaaaacaggctgaccagcatgatcgcgttggccgggacgcgttttttcgtcaccagcttgccgaataccctgggcaatgcgccgtcgcggcccatggcgaatagcacgcgggacacgctggcctgggagaccatcgcggaggcgaaacagcccgccacataggtggcggtaaacgcactcaccagcagctcgccgccgacccggcgcatcacatcgaccgaagccgagtcgggatcggcaaaactattccattccgggaagaccatctgggcgcaatacgacaccaccagaaacagcaacccaccgatcagcgacaccgccatgatcgcctgcggaatggtacggcgcgggtcaggtgtctcctcagccatggtcgacacggcatcgaagcccaggaacgacaagcacagcaccgccgcgccggtcatgatcagcggcacactgaagccttcatggtgaaacggcttgagcagcgacaccggctcggcttgcccgctgaggttgtggatcgacaacgccacaaacaccacgatgaacaccagttgggccacgatcagcacccaattgacccgggtaatcgactcgatacccaccagattcagcgccgtcaccagggcaatggagcccaatacccatacggcggtgggcacggtaggaaagtattcggacaagtagatgccgatcagcaaatagctgagcagcggcaggaagatgtagtccagcagcaaggtccagccggcgataaagccgaaggaggcgccaaacgccttgcgcgtataggtgtagaccgagcccgaatacgggtgcgccttgaccatgcacccatagctgtaggccgtcagcagcatggcagccagggtcagcaggtaggcggtggcaaggtgccctttggtcatctgggtcaccaggccgtaggtggtgaacaccgccagcggcaccatatacgccaggccgaacagtaccagcccgacaaggcccaggggttgtcgaaagcggcgcgatgaggttggttgggttggggtttgatggacgggagtatcggctacgtttgttattgtattcattgctgactcctggaaagtggaatgcagggcgccgcggcgttcgatcaaatcgacacctttgatgagtcatccattgggagcggtgggcaggccgctatggggcgcccaccctgttcaaccgaagcggcatgcgggggcttagcccttcacagttttcccgcgatccgtgcggtgcggtccaccgcgatgcgggtcttgtcgaccagctcatcgagctccgcgtggctggccaccagggccggcgccatgatcatgcggcccagggtcgagcgaatgatcacgccttcttcaaagccaaaagtgcggcattgccaggccaggtcgttttcattggcaaagcgcttgcgcgtgcccttgtcctcgacaaactgcaaggctgccagcaggccggtgccctggatatcgccgatcagcgggtggttgccaaagacttcgtgcaggagcgtgtgcaaatacggcccggtgtcgtccttcacctggcgcacgatcccttcgtcacgcagggccttgaggttggccagggccaccgccgccgcaaccgggtgcccggaatacgtcagtccatgggcaaacactccgccccgctccaccagggcttcggccatgcgcttgctcaataccaaaccgcccatgggcaggtaaccggaggtcaggcccttggcgatcgacaacgtgtcgggttcgaagccgaaatgctgatgggcaaaccactcacctgtacggccgaaaccgccaatcacttcatcagcgcacagcagcacatcgtattggcgacagatgcgctggatctctggccaatagctttctggggggaaaatcatgccgccggcgccctggaaaggttcagcgataaaaccggcgacgttttgcgcgcccaactccaggatcttttcttccagttgcagagcgcagcgccgcccgaactcggccggggtcaactcaccgccctgggcgtaccaataaggctcgtcaatgtgcgcgacgtccgggatcaagccgcccatttcatgcatgaatttcatgccgcccagggcagacgccgccagtgtggagccgtgatatccgttccagcggccgatcatgatcttcttctgcggcttgccgagcacttgccagtagcggcgcacggtgcggatcagcacctcgttggcttcggaaccggagttggtgtagatcacatggctgtagtgccctggcaacaggctgaacagcaactcggacagctcgatcaccgccggatgggtggtgtgaaagaacatgttgtagtacgccagctgatccatctgcgcggccgccgcagcggtcaggtccttgcggccataacccaattgcgtacaccacaggcccgacatcccgtccaggtaacgcttaccctcgctgtcccacaggtacaggccctcaccccggaccattacgcgggggccttcggcattcagcgccttttgatccacaaaggcatggatatggtgggccgcgtccgaggcctgatagtcccgggtctggcgttgcggttcaaagggtaggttcatggctttttctcttgttgtgggtagtcatgcagccggtcaacggcctttgctcatgtagcgttcaagggggtctttgctcagcccaccctgggcctcggccagcgagtcgataaacagggaaaacagttccgattgcgtgccgatgtcgagcttgctgtagatgtgcttgcggtgggacttgatggtgtcttcggagaccccgaggcgctcggccagcgaacgtgtggagtggccgcgcaggatcaactgggtgatccggcattcgcgttcggtgagcagcgaggagccgaagttgttgagtgccgagtgaatacgctgttccaacaggctttcgaaacgcgcgccctgagtctccaggccgacgaagtgcttgcccagcaccgccagtacccaaggcgctatgcgcttgaattgctcggtggtggtcgcgtcgagcttctgcgtaaaggccagcgacaccgccaggctcaagccgttgctggcctgcaggatgtagttgagctcatcctccaggtgcgaatgccggtaaaacgactggtagtactcgctgtgctcgaagtgatcgggggctacgtcggcgaggtcgtagcagccggaagccgccccctccacgcaggcgccgtagaacgggtcgagcaagtaaaacccggagaggtactggcgcacattgccctggggcagccatggcccgtccagttcgaacactgcgctgggcatgccgtcgtgggggtacaggtacaaggtcgtggcctgaatggggcggatacaccccagagcatcgaacaacgtggcggcaaaccccgcgtgcccgatgctctcggtcaccctggctatctgttcgaaccactgggctgaagacagtcgatcattttccacgtcgaagactcgccgtcataacggttgggtgcgacaccaggtcactggcgccggggactgaagtgatagtcccacacccgcaaagtcatcgaaatcaccccttagggtgagggggtgcgctggaacctcggaatcgccaagcccaggctttcgcgcaaggtcgagccctcgtaggccgtgcgataaacaccgcgctcttgcagcaacggaatcacttcctgtgtaaaacgatcaaattgcccagggtgcccgaggtagatattgaacccatccacggcccgcgcctcgaaccaatccgctagtttctgcgccaccgtggcagcgctgcccacgaacgcgcctgggcgcaattgccggccaaattcgacggcctggcgcagggtaaagcccttttcccgggcctggtcggcgatgcgtttggcagcagtgaaaaaactgctgcgcgccgcctccaggctctcttgtgggaatggcgcatccaggtcgtactggctgaaatcatgccagccaaaattgcgcccgaactccttgagtgcctgcgcaaaactgtggtcgagctgatggtagtgctgctcgatttcccgggcatgggcatcggtgtcgcccacataaatttccgcaccgggcatgatcagcacctgttccggatcgcgcccccgttgtgccgccctgcccttgatatcccggtaaaacgcctggccctgctcgatactggccgcgtgggtgaagatcacatcggcggtggcggcgcccaggtcgcggccttgctcagagtctccggcctggaaaatcaccggctggccttggggcgagcgctggatattcagcgggcccaccaccgagaagtgttcgccctgatgattcaggctgtgcagcttgctcgggtcgagaaactgcccagtggcacggttgcgcacaaacgcatcgtcttcgtaggagttccacaacccctgtaccacctgaacgtgttcggcggcgcgaccgtagcgggtggcgtagtcgtagtgttcgtcgcggctgtaattgccggcggtaccggcatcgccactggtcaccacgttccagccggcgcggcctttgctgatcaggtccagggaggccaggcgccgggcgacgttatacggcgagttatacgaggtggtcagcgtaccgaccaggccgatatgccgggtgctcacggccagtgccgacagtaacgtcaacggctccaggcgattgaggtaatgggaaggcgaaccttcggtgatgaactggctgtcgacgataaacatcaggtcgaacagtgcggcctcagcctggcgcgctatctggatgtaccaatcgacgttgacgctggcatcggccggcaattgcgggtcaagccacaggttatggcggcccggcccaccgcagcccatggtcagggcgcccagtttgagctgtcttttagtcattgcgcagtagtccttcaagcgttcagggctgggtggtggcgacggcgggctgcaaggcggccgcgaatgaagggtcgaacaacgtggcggccgagtaagacttgaccaggcccaggccggcaaaaaagtccacggtcttttgcgcctcgatgggcgcctgaggcgtcagcggctcgacggtggtgcgcgcacgggcaaaccagacgcgggcgatgtcggcatccgcgcgggtgcgcttggcccaggcatcggcatacgcgttggcgttggccgggctttggcgcgcccagtcacgggcttttttcaggcgctggaggaagtcgctgatgggttcacgtttggcctcgacggcactggcgttggcggcaatgaaactctgggccggaatcaggtcttcagcggttgccaacacccgcgcaccttggcgctcctgttgcgtgacgtagggttcccaggtggcgatcacgtcaaccgcaccgccttccagcgcgtgggaagcatccagggcgctgaggtagcgccattgcagcgaatcccgtgcaaccccggccttgtccagtgcagtcagcaacagttgctggctccaggaacctttccagatcgcggcgcgcttgcctgccagatcggccaggctgtggatcgacgagtccttttttaccaggatggccacgccgtcgagattctgccggctcacggcgatcaccttgatcggtgcacccagggcgcccaggaacaacaccggggcatccccgagcaggcccaggtccaggctgccaacgttgagcgcttcggccaccggtgacccggccgtgaactgtttccagtccagcgtataaggcagatcatccagcacccccgccgcttccatcacggcctgggcgttgtagctctggtcgccgaccaccagggtttgcgcctgcgccgtcaggcacagcaatgaggcaaccaatccagccgccaggtttttgaggtaacgcacgttcgtctccagatgccttgtgaggcattcaaatcgatccgcgcgtacggtctcggttttataaggtcatttgttgtcaggggtatttttgcggtgttgaaggcgggatgtaaaatactgataacgcataacctaattcaataataatgcgcatatcgcatcacgctagcgcggcaattcaacccgggccaccaaccccgaaccgcgccgattgctcaggctcagctcaccgccctgctcgcgcacaatggcccgcgccgccgagagcccaagccccaccccaccggtattgcggttacgtgaggtctcaaggcgaaagaacggatcgaacacacgctccaggtccgcttcaggaatccccgggccctcgtcgcagacctcgatgcacaccctctgatcgtcaacactcagagcaatgctggggtgccgtgcgtacttggcagcattttccagcaggttgaccactacccgtttaagccccagtggccggccgtgatagaccagatggggcggcccccggaagtcgaccaccagttgctggtcgcgatagtcgtcgatgatggtttgcagcagttccgacagatcgaacgccgtgctgtgctccagcaccgtatcgtcgcggaaaaacgccaatgcggcgttgatcatcgactgcatttcctcgacatcgcgaatcagcttgtgctgatggtccaggtcttccatgaactcgcagcgcaggcgcatccgcgtcaaaggcgcgcgcaagtcatgggaaatggccgccagcatatgggtgcgttcgccgataaagtgctggatctgcgcctgcatggcgttgaaggcgatggtggcctggcgtatctcgtcggggccttcgatgtcgatgggcggtgctcgcagatcgccgccgaagcgtctggcggcactggcgaaacgctgcaacggcttggccaattgccgggtggcgacccaggcgaccagcaaggtagcgatcagcccaagaatgatgatgaccgcaatccgcgtgggtgcgctcaggccccaactgcgtacgggcggtatgaaagacaaccagctgccatcaactaactgcaccagcgccacataacgtgcgtcggggctgccacgcggccaatcgtccgggctgtacacctgaatggtgcgccccgtgccaaacaatgcctgtatcccagggacttcgccggcttgtagcacgttgccgccgctgggcaggccgaaatccacggggttggtatgccacgtcacctgcaaccgagtatcgctggccgctgccgccaggtgcgagcgcaacggcgcaggcgcggcctcgatcactttcaacgtcgcggccatttgttccagtaaccccgtgcggtcgatgggcgggcgcgcccacaccccggccacctgcacgaacaaggcgttaagggccagtgaggcgagcatcgcagcgaggatggtcagggcgatgcgccggttcagggtgtcgcggcgcaacaggcggcggatcatgagcgggtcaccggcgcggtaaacagatagccgccattgcgcacggtgcggatcaggtccgggcgcttgcagtcgggctcgatcttgcggcgcagccggctgacctgcacatcgatactgcggtcgaaggcatcgtggccctggccgtgggtcaggtcgatcaattggtcgcgggtaagaatgcgctgggggtgttcgagaaacactaccagcaggtcgaactcgccaccggacagcgggatcatgacgccctcgggcgaacgcagttcgcgacaggtgatatccagatgccaaccggcgaaggcaatcaccgggcgtgagcgctcgtcggccgcactgaccgactgccccgcacgccgttgcacagcgcgcaggcgggccagtaattcacgcggggcgaagggtttggtcaggtagtcgtcggcgcccagttccaggccaacaatgcggtcgctcaactcgcccatggccgtgagcatgatgataggaatgccgaactgtgcccgcactttctggcacaggctgaggccgccttcgccgggcaacatgaggtcgaggatgatcgtgtccggccgctgctgcgcgatggccgcccacatggcctcgccgtcggcggccacgtcgacttcataggcgtgctggacgaagaacttcttcagcaatgccagcacttccacgtcgtcatcgacgatcagcagtctgctcacgttcacaggttcccaagccaaaaaaagaacgacatctaaaaccattccggcgccggggtcatttatttcaatcgagcaacattccttcgccacggacacaacccggacatctttgggtaaaacctgtcgggcattctgcacgtcttccattcaaggagacgcctatgaaagtttcgagcagcaggtacaccgagcaggccgcgagcgacgcgcgaccattggtgctgagccagcgcacctcttccccggctcaggatagcccgatgctgttccaggaatcctgcctggggctgaacgcggaactggaccgtatcgtgctgcgtcgctacttcgaacactacagccccgacgccgggcggtgggtcgagtacgcccactccattcccatcgccgagcttgtccactggatcatgacccatggccagttgcacatcgaatcctcgcacgacactccaaacgaacaggcaacccattgatggcccgtaaatgctcattcctgctactgatggcggccaccctgagcctgatcgcttgcagcagcaacaaggtcgaacccgagcgatatacaggctttcttcatgactacagcctgcttaaagagcaacagagcccgtcgggccagaccgtacagagttgggtcagcccggccttgaagcgtggccgctacaagcaggtatatctggcgcccagccagtttttcccggctgttgaaccctccgctcagatcccccaaaatacgctctcccacgtcaccggctactacgacttggtactgcgctcggaacttggcaaatacgtttacctggcctcgaaacctggccctgacaccctcacagtacgccctgccatcacacacatcgccaccagcccccagggactgcggttttatgagtggctgccgatcaccctggtcgcagcgggcgtgagcgccgccactggcatccgcgatcgagacagtgaaatcgccacggagctgtcattggaagatggttcgaccggcgatgtcgtggcggccatggtgcgtaaaggcaccggtgctcccctggccaatgacaaagaagtcatgaccgctgacaatgtcaaggacgtgctcgacggctgggcccgcgacctgggtacgtcgtacagtgcagtcgctcgataaccctcgccttgctcaaacgtcataatcacaggggcatctgcgtggtaatctcccggcaccacgaatagacattgatcgtcacttgacgatgaccaaagccaggaaagaccatgcccaagatttctcattcagcgctacgccgtaacttccgtgacctgctggcaacgccgatctgcgttgaaaccgcttccgtattcgaccccatgtctgcccgcatcgcggctgacctggggtttgaagtgggtatcctgggcggctcggtcgcctccctgcaggtgctggcggcccccgattttgcgttgattaccctgagtgagttcgtcgagcaagccacccgcatcggccgtgtggcccagttgccgttcattgccgacgccgaccacggctacggcaacgccctgaacgtgatgcgcacggtggaagagctggaacgcgccggcgtcgcggcgctgaccatcgaagacaccctcttgcccgcgcaattcgggcgtaaatccacggacctgatttccgtcgaagagggcatcggcaaggtcaaggccgcgctggaagcgcgcgtcgacccggcgctgtcgatcattgcgcgcaccaatgccggcgtgctgcccaccagcgatgtgattgcgcgtaccaaggcttatgaaaaggccggtgctgacggcatctgcatggtcggcgtcaaggacttcgaccacctggagcagatcgcagagaacctcagcgttcccctgatgctggtgacctacggcaacccacaactgcacgacagtgagcgcctggccagcctgggtgtgcgcatcgtggtagccgggcatggcgcctacttcgccgcgatcaaggccacctacgacagcctgcgtgcccagcgtcagctgacccacagcacttcgaacctcagtgccacggaattgacccacacctacaccttgccggaaagttatgtggcgtgggctgaagagttcatggatgtaaaagagtaatcaatcactcacggttcagccgttggcgcatccctgcgctggcggccgggccgggctgtacctcgcactgatccatcgccaccaacgcaccttcagccgtcgccatcaccggctgcaccggtcggcccgtctcgcgttccaccacctcgacactgatgccctcctcggcgtaatgccggttgccccacgccactaacgccatcagcaccatacgaaagtcctcgcccctggccgtcggcacgtattcgtagcgtggcgggcgctcgctgtaggcacggcgctccagcatccccgcttccaccaagccattaagccggcgcgtcaacatgttgggcgcgatgcccaggctgcgcgagaactcatcgaaacggcgcaggccgtgcaaggcgtcgcgcatgatcagcatgctccaccactcccctacccgctcaaggctgcgggcgatggggcattcggcactgatgagggatttgcgctgcataagtattcctgtgtgcgagtaaaaacttgaaggatgccatgttactttcatgatgatagtgacgtccatacgctgtgtatccttcaagcaacaggagtcgattgagcatgagtaaacgtatcgtcgtgacgggcatgggcgcgctgacgccgctgggatcgagcgtggaatccacttggcagcgcttgctggacgggcagtcgggcatccgtcgtttgccgcaagaattgatcggtgatctggcgatcagcatcggcggccaggtgcaaagtgtgctgcaagaccccgaagccggttttgatcctgatcgactgctggcggccaaggaacagcgcaagatggaccgctttatcctgttcgccctggcggccgcggatgaagccttgaagcaggccaattgggcacccaaaacacccgaggagcaggagcgcacggcgaccatcatcgcctccggcgtcggtggtttcccggccattgccgatgcggtgcgcaccaccgacagcaagggcccgcgtcgtttgtcgcccttcaccattccatcgtttctgagcaacatggctgccggacatgtgtcgatcaactatggcttgaagggccctctgggtgcgcctgtcacagcgtgtgccgccggggttcaagctatcggcgacgcagcgcgaatgatccgcgccggagaaatcgacatcgcggtatgcggcggtgccgaagcggcgattcatcgcgtcagccttgccggcttcgccgcggcgcgggcgttgtccagcgatttcaatgacagcccgcagcgtgcttcgcggcccttcgatcaggcgcgcgacggctttgtgatgggcgaaggcgccggcattctggtgattgaagagctggagcatgccctggcacggggtgcgcagccgattgccgaactggtgggctatggcaccagcgcagacgcctatcacatgacagcagggcctgaggatggtgacggtgcgcgccgggcaatgacccaagcgttgcgccaagcgggtatcgaggcgtcgcaggtgcagtacctgaatgcccacgcaacctccacacctgtgggcgacaaaggcgagctggcggcgatcaaaacggtatttggtaccggcggcagcccggcgatcagctcgacgaaatccgccaccggccacttgctcggtgctgcggggggcatcgaagccgtcttcaccgtgcttgccctgcgtgaccagatcgcgccaatgacactcaacctggaaaacccggacgccctcgccaacggcctggacatggtgcgtggtgaggcgcgccccatggcgattgaatatgcgctgtccaatggctttggctttggcggcgtgaacgccagcgtgctgttccgacgctggagatgagccagggtttgccccagaggtgaatttcaccgaccatggcgcctttctgttcctgccaacaagaggtgcccatggccaaccacgacctgtcctatacccctgatccggacgccgattccatctcctctgacgtgatcggcttcaacggcatcctggtctccacccagattcccacccgtgccgatggcagcctggagctgggcgatatcacccagcaaagcgagtgcaccctgcaagcgctgaaagtcgcgctggaaaaagccggcagctccatggaccgggttatgcacttgactatttacctcaccgacatggccgaccgcgcggcgttcaacgaggtttacaagcgctttttcgccaagccctggccagtgcgggcagcagtgggcgttgccgccttggcggtggaaggtatgcgggtggaagtgacggcgatggctgccaaggcttgaatctgtgacgtttttagaaccgaactgatcggaatgttgaactcggtcaaaaaggtgggagctggcttgcctgcgatagcggtggtgaatgttcaatcgccatcgcaggcaagccagctcccacattggggcttcgttgcgttgagtaatgcgttcgcttaacggacttgcattaggcccgacagccctgcggtagatgccgcccaggcatttcgcggctacaatgcgcgcctcaaccgtgacaagcctgactaaaaaaactatgtccttgcccaagcatcacctggaattgctcagccctgcccgcgatgtcgccattgcgcgcgaggctatcttgcacggcgccgacgccgtttatatcggcgggccgagcttcggcgcccgccataatgcgtgtaacgaggtgagcgatatcgctcaactggtggaattcgcccgccgctaccacgcccgcgtcttcaccaccatcaacactatcttgcatgacaacgagctggagcccgcacgcaagctgatccatcagctctacgatgccggtgtcgatgcgttgatcgtgcaagacctgggcgtgatggagctggatattccgccgatcgagctgcacgccagcacccagaccgacatccgcacactgggccgggccaggtttctcgaccaggccggtttctcgcagttggtactggcccgcgagttgaacctgcaagagattcgcgccattgccgatgagaccgatgctgccatcgagttctttatccacggcgccctgtgcgtagccttctccggccagtgcaatatctcccacgcgcaaaatggccgcagcgccaaccgtggcgactgctcccaggcctgccgcctgccctacaccttaaaagatgaccaaggccgcgttgtagcctttgaaaagcacctgctgtcgatgaaagacaacaaccagagcgccaacctgcgcgccctggtcgaagcgggtgtgcgttcgttcaagatcgaaggccgctacaaggacatgggctatgtgaagaacatcaccgcctactaccgccagcgcctcgacgagatcctcgaagaccgcccggacctggcccgcgcttccagcggccgtaccgcgcacttcttcctgcccgacccggaaaaaaccttccaccgtggcagcaccgattactttgtcagcgaccgcaagatcgacatcggcgcctttgacaccccgaccttcaccgggctgcccgtgggcaccgtggaaaaagccggcaagcgcgacttgcaggtggtcacccatgagccgctgtccaacggcgacggcctgaatgtgctgatcaagcgtgaagtggtgggctttcgtgccaacatcgccgagcccaagggtgagttcgaggaagacggtgagaagcgctaccgctaccgcgtcgagcctaacgaaatgccggccggcctgcatcaactgcgcccccatcacccgctcaaccgcaacctggaccacaactggcaacaggccctgctcaagacctcggccgagcgccgtatcggcttgtcatgggtcgcgcgcctgcgtgaagagcagctgcaaatcaccgcgaccagcgaagaaggcatcagcgccagcgttatcctgcccggcccgtttggcgtggccaacaagccggaacaggcgctggacaccctgcgcgacctgctcggccagctcggcaccaccgaataccatgccacccgcatcgagctggatgcgccgcaggcgttcttcatccccaactcgcagctcaaggccttgcgccgtgaagtgatcgaagcgctgactgtcgcacgcgtcgccgcgcacccacggggtgggcgcaaggctgaaacctcgccgccgccggtttaccctgaggcgcacctgtcgttcctggccaacgtctacaaccagaaggcccgggacttctaccatcgtcacggcgtaaagctgatcgacgcagccttcgaagcccacgaagaaaccggcgaagtgccggtgatgatcaccaagcactgcctgcgtttctcgttcaacctgtgccctaaacaggccaagggcgtgaccggggtgaagaccaaggtggcgccgatgcagttgatccatggtgacgaagtgttgaccttgaagttcgactgcaaaccttgcgagatgcacgtggtgggcaagatcaaggggcatatcctcggcctgccgcagccaggcagcgcagtggagcatttcaacccggaaaaccttatctaccaaggcacgcactaaccctcacctgtaggagcgagcttgctcgcgaaaaaccagagaacgccgcgtttcaccccgatgcgctgcgtcatcgttaaccttcttcgcgagcaagctcgctcctacccaggttgcggggccaccaccagccccgctgcaaccccgccgctgccagcagaatcgccgccacgcccagccattgcagccaccccaggcgatgcccgaacgcaatccaatccactaagatcgctgcaatcgggtagatgaacgacagtgcgccggtaatggcggtcggtagtttctggatcgcgccatacagcagcacatacatcaacccggtatgcacaacccccaagatcagcagcgcagcccaggcatttgtggacgcaggtaagccattccagggcaccagcggtgccagtagtaccgcaccagtggccacctgaatcaatgccatcaaatgtggcggtatttccttgaggcgcttgatgatcagcgcagcgatcgcatacaaaaatgccgcccccagggccagcgcgatgcctaccagataatcaccgccaccggtttgctcgccatgggcggtgacaatcgccaacatgcccaggaacgccacgctcaaccacgccagtttctgcacggtgattttttcaccgagaaacaccgccgccagcatcaccaacataaacggctgcacgttatacaccgccgtgctgatagcgatggaggcacgggaataggattcaaacagcaacagccagttgccgacaatggccacgccgctgagcatggccagccccagtttcgcccaactgagcaggtctacacgcaggtaacccagccaggcgcacaccagtaacagtgtcagcgcgccgatcacgcagcgccagaacaccacctcgatcaccgacacgccagacaccagcacaaaccagccaatactgcccgagatcagcatggcggcgaccatttcccacgacccgcgacggatggatgaatccatgattgaagctcctcaagtgaagctccagtatggcaatctgtccgcgacggctacagcgtcaaaaaaaggcaaaaccccgaattcaccttttcttattaggcacagaccatgatcgacaccatcgaccagcaattgatcgccgccttgatggacgactcgcggctgtccctcaaggccctggcgggcatcaccgggctgtcctcgcccagcgtcagcgaacgcctgcggcgcctggaagaacgcggcgtgctgacccactacaccgtcgacatcgaccccaaacacttcggctacctgctgcaagccatcgtgcgcatccgccccctgcccggcaaactgcaggaagtggagcgccagatccaggcaatccctgaattcaccgaatgcgacaaggtcaccggcgaggactgcttcatcgcacgcctgcatgtgcgcaccatggaccagttggacagcctgctggaccggatcaatgggtatgccgaaaccaatacggcgatcgtgaagaaaaccccggtgaaacggcgcctgccgccgctgggggatcgctaaggtgccatgccaagggcgtgtcatgaccaaacacagtcaaatgtgggagcgggcttgctcgcgaatacagggtgtcagtcaccgactatgttgacgggtataccgcattcgcgggcaagcccgctcccacaggggatctgcgccgggcgctgattctgtgggcaatacataattagtgtgggagctggcttgcctgcgatagcgatggttcagttgaatattcagtgactgacacgccgcattcgcgggcaagcccgctcccacagaagccacttcaagccgttgattgtttgaacccgcacttggccacggccctccaacctgaatgaaccacggccgggtacacgcacaatgacgttcattttatggttggccgtattgggcgcggtgctgctgacgctcgcgctcacttcctcctacctgcgctggatgccagtcaccacctcagcggtgtgcctgctgctgggtatcgccatcggcccgctgggcgttgacctgctggacctggacatcaaggattcggcgcgctggatggagcacctgaccgaagtggcagtgctgttttcgctgtttgtcagcggcttgaaattgcgcctgccgctcaagcatcgcacctggcgcatcgcctttgggctggccggcccggtcatgctgttgaccatcctcggtaccgggctgttgctgcatcacctgctggatatgtcgtggggcgtgtcattgctggtgggcgcgattttggcgccgaccgacccggtgctggcgggcctggttcaggtcaacaatgcccaggattacgacgcgctgcgcttcggcctgtccggcgaagcggggctgaacgatggcagcgcctttccgtttgtgatcttcggcctgctgttcatgcaacacagcggcttcgatggcgactgggtcggcggttgggtgctgaaaaacctggtatgggcggtgccggtcgggctattgatcggctactggatggggcgaggtatcggccgtgtgacgttgcgcctgcggctgatcaatgccgacagcaccctgtcgcccaatgattacctgacgctggcattgatcgccctcgcctatgtgagcgccgaagccgtgggcggctatggcttcctgtcggtattcgcggcgggcctggggttgcgtcaggccgaggtgaagtccaccggtaatgcccagacacccgccgagcacctggcgcaaccggtggtgggccaccttgaaatcgagcccgagcaagccttgcatggcgacgtcagccacctgaaagacacccagatcgcggcaggtgtgatgatgggcgacatgctggccttcggcagcctggtggagcgggccatggaggtgttcctggtgacagtcttgggcatcgtgctgatcagccactgggagtgggccgcgttggcggtagcgctgctgctgttctgtgtaattcgccccgccagcgtattcgccatgccgtggggccgcctcctggaccgtcgtcaacgcagcctggtcagttggttcggtattcgtgggatcggcagcatttactacctgttctatgcgctcaaccatgggctggtcggcaccagcagcgaggtggcggtcaacctgacgctgtcggtcatcgcgttgagcatcctggcccatggcctgagtacccagccgatgctggcgtggtatgagcgtaaggctgcgcaaaaaaaatgaatcctgcaccgcgccggggtttcaaacagtcaggacccacagtacgagccagccaatgaaaaagatcgcccaacgattgcttgaggaacgccaacgcctgggatattcgcagcaatatctggcgcaggcaggcggcgtgaccgcacgcgagcaacgtcaatatgaagtgggcgaagacctgccccatgccgactatctggcagccttggccgagcatggggtggatgtggtgtatgtgatcacgggcaagcgcagcacggtggtcaatatcagccgcgaccaggcgcagacgctgatcgataaccgcgtggtgggccaggaggtgtcgctggacggcggggccgaggaagacgtctacttcaagctcagcaatccctcgggcccgccgccggatcagtcctgattttcagtgttgccaacgtccgccgcttcatccaggtcgttcagcggtacttcggcatcgtccatcagcgaacccgggtcttcgttgccggggtcgttgagttcttcgtccagttcttttgacatgagcgtctcctctaaccgccttgggtatcgatgtcggcatcggtttcaggcttgggctcgcgctcaggcttgaagtctggactgtagtcgttttccttggcctttgggtcgctcgcaggcgtcggatccttgggcgcatcggcggcggtgccaggggcaggctcgccgccgtcgatcgccgggtcattgcgattgttagtctgtggatcattagattgggtcatgaggcacctctttgcaggccggtaaaaaatctgtaccgcatagaggtaaggcgtcatggccacggctgaagttccgttcgcttgctcagcgcagcgggttgtccacctggatatagaacgcatagatgcccaacaccagccagaacaccatgaacagccatggcgcacgcatggaaaacaacagcgacttgcgatagcccttgtggctcgactccacctcggaaaacagcggcgattcatcgtacgccatgcccatcaccggctcgctgcgcagcaattcgctttgcttgtagtgccagtggtcgatgatttcatacgccgcacggataccgggccaggcattcagcgaactgagaatacccagcgaaaccaggaagatcggcaccaccagcgtgaacagcttgccccattccgggttgaggttacccatgccggaaacaaaggcaatcaccaggaaggactgcgccgtcaggtaggcgtcggtgcggttggccaggatgctggtttcgtactgaatctcgcgccggtaaaagtcgaggcggtccttgggcgagccgaaaatctttgcgttgtgttcgctgtggtcgttcagggccgcttccggagtgtggggggagatgattctggacacgacggtgctccacaaggtgacgaaactccttagaagaatcggggcctagtgaagttcaagtcggttcacgcaccaattcagggcagccaccgccctctgtaggagcgggcttgctcgcgaaaaacgtcaacgctaacgcgggctgcctgattaaacgcggtgccggtgagtttttcgcgagcaagctcgctcctacaggggattaacggcattccggcacaggcattgctttatccattcaccacccggaaaacaggagcatgcgttaccccctgacccagagccgcccctataagaaagtaaggaccaggtctgttggcaccttcagccacgggctcataaaaacatgcgtttttttaagcggcagtgccacccaaagccacacactgggcactgacaaggtactggaatggctcgatctttctttgatgaaatgaatgacgcaaacggcgtatgccgtgcgcactatcaggacttctctcgctggctggccaacacgccgccggaactgctggcccagcgtcgccgtgaagcggatttgctgttccatcgcgccgggatcaccttcaccctgtatggcgacgagcaagacaccgaacgcctgattcccttcgacatcattccccgcagcatccccgccagtgaatggagcctgatcgagcgcggctgtatccagcgggttaatgcattgaacatgttcctcgccgacatctaccacgaccagcgcatcatcaaggccgggattattcccgccgaccaggtcctgggcaatgagggctatcagaaagccatggtcggtcttgacctgcaccgcggcatctactcgcacatctccggcgtcgacctggttcgcgacggcgacggtacctactacgtgctggaagacaacctgcgcacccccagcggcgtgagctacatgctcgaagaccgcaagatgatgatgcgcctgttcccggaagtgttcgccaagcagcgcattgcgccggtggatcattaccctaacctgctgctcaagaccttgaagaactccagccgcctggacaatcccaacgtggtcgtcctgactccagggcgcttcaacagcgccttcttcgaacacgcgttccttgcccgggaaatgggcgtggaactggtggaaggcgccgatctgttcgtgcaggacctcaaggtgttcatgcgcaccaccgacggccccaaggccgtggacgtgatataccggcgcatcgacgacgctttcctcgacccccaggcgttcaaccccgagtcgatgctcggcgtgcccgggctggtggcggcttactgcgccggcaatgtggtactggccaacgccatcggcaccggggtggctgacgacaagtcgatctacccctacgtaccggccatgatccgcttctacctggacgaggaaccgatcctgcagaacgtgccgaccttccaatgccgcaagcccgatgaactgtcccatgtgctggccaaccttgagcaattggtggtcaaggagacccagggttccggcggctacggcatgctggtgggcccggcgtcgacggccgccgagatcgaagacttccgccagcgcatcaaggcccgtccccatgcctatatcgcccaacccaccttgagcctgtccacctgcccgacctttgtcgaaaacggcatcgcgccccggcacatcgacctgcgacccttcgtgctctcgggcaaggaaacccgcctggtgcccggtggcttgacccgcgtggcgctgaaggaaggctcgctggtcgtcaactcgtcgcaaggcggtggaaccaaggacacctgggtggtggagggctgagtatgctgagtagaacggctgcagatctgtattggatgtcgcgctacctggaacgcgccgagaacctggcacgcatgctggaagtcagttattcgctgtccttgatgccccaggccgggcgcagcgatggcctggatgaactggcgatgtcgttgctcagcagcggcaccctggacagctacctggaacggcaccagaccctggatgctgagcgcatgttgcacttctttgccctcgatgcagaaaaccccgcgagcatttacaactgcctgcgcgccgcccgaggcaatgcccatgcggtacgcgggcgcatcaccgccgacatgtgggaaaacctcaacgccacctggctggaaatgcgcagcatcgccgccggtggcctggcgcgacacggtatcagccacttctgtgactgggtcaagcagcgctcgcacctgtttcgtggcgcaacctcgggcaccatcatgcgcaatgacgcctaccgcttcattcgcctgggcacctttgtcgagcgcgccgataacaccctgcgcctgctggatgcacgctatgagatgttcggcgaagagtccgaagaagtcagcgacctgtcggcacgcggttattaccagtggagcgccctgctgcgcgcgttgtcgtcgttcgaggcgtataccgagctgtatccgaatgccttgaatgcacgctcggtatccgagctgttgctgttacgcagtgatgtgccgcgttcgctgcatgcctgcatcgaggaattgagccatattctggcggacctgcccggcagttatgggcgcacggcgcaacgcctggcggcggagttcgaggcgcggctgcggtacacggggattgatgagattctggaagatgggctgcacactcggctgacagaattcatcgacaccgtgcgtgagttggcgcgggagatacaaagctcctacctggaagtggtctaacacaaacctgtaggagcgagcttgctcgcggaaaactcaccggcgccgcgtttattcagaaaacccgcgttatcgttgacgtttttcgcgagcaagctcgctcctacaggggggtgatcgcccaccagcgcggcagcaactggcgcacccgcgactcgccgaagcggtcgtcgatcagcatcaccaccccgcgatcctgctggctgcggatcaccctccccgctgcctgcaccactttctgaatgccgggatacaggtaggtgtagtcgtaccccgcgccgaacaccgcgcccatgcgcgctttgatctgttcattcaccgggttgagctgcggcaaacccagggtggcgataaaggcaccgatcaggcgcgcacccggcaggtcgataccttcgccaaacgcaccgcccagcaccgcaaagccaatgccctggctgtggtgggtgaactgctccaaaaaggcgtggcgctcggcctcggccatgccccgcgcctgcaaccacaactcaacctgtgggtgccgttcggccattaactgggccacctgttgcagataatcgaagcttgagaaaaacgccaggtagttacccggttgcgcggcgaattgccgggcgagcagttccacaatgggctccagcgatgcctggcgatgcacaaaccgcgtagagatgcggtcaatgatgctgacctgcaattgctcggccttgaacggtgatgccacatcaacccaggcggtatccgccggcaggcccagcaagtccgcgtaataatggcgcgggctcaaggtcgcggaaaacagcacgctgctgcgtgcggcggtcagcctgggccgaatgaactcggccggcactacattgcgcaggcacagggtcgagctgctgcgcttgccgctgaactggcgcttggtgatatcgaagataaagtgctcattgaacagctcagccactttggcccattgcagcgcgtcgaagtagaaggcttgcaggtcgccgctgagggcttcggggtggtcgttgaagtagtcgcccatggcgctggtgcacaggctcagcgcctggagcagtttgtccggtttggccgcgtatgcctgatacggcgcgagttggtccttgtgcaacgcattccactcgcggttcaagcgctgcaagggtttgttcaggggctcgggcgcgttatcgcgcaaggtcttgaggctgtactgatccaggctggcgctgtacatcgagcgcgcgcgttcgaccaggttgtgcgcctcgtccaccagcaccgcgacgcgccattggttgagctgggccaagccgaacagcatggcgccaaagtcgaagtaatagttgtagtcggcgacgatcaggtcgctccagcgcgccatttcctggctcaggtagtacgggcatacctgatgggccagcgctacgttgcgcaggctgcgctggttgagcaagcgcacctgggacgcagcctggcgggcggcaggcaggcggtcgtaaaaacccttggccaatgggcaggaatcaccgtggcaggctttgtccaggtgttcgcacgccttgtcccgggccaccagttcaagcacacgcagtgacagctcggggctgctgtcgtacagaacctgggcggcatccagggccagcttgcggccgggcgtcttggcggtgaggaagaacagtttgtccagttgctgcggcgccagggccttgagcagcggaaaaatagtgccgatggtcttgccaatgccagtgggcgcctgggccatcaggcaccggcccgtactcaccgctttgtagaccgactcggccaggtcgcgctgcccggtacggaagtcggcatggggaaacgccaggctctgcgcagcggcgttacgcgcgtcgcgatgctgcatctcttgccgggcccagtccaggaacagcgcgcattggtgattgaagaattgctcaaggcctggcgcatcgaatcgctggttcagcacggtttcgccttcgccgacgatatcgaagtacaccagcgccaggtcaatgtgatcgagcccgagtttctggcacatcagccagccatacaccttgacctgggcccagtgcagttgccggtggttggcgggctgagcggcgaggtcgccacggtaggtcttgacttcttccaggcggttggcgtccgggtcatagccgtccgccctgccccgcaccttgagctgctggtagtcgccctccagggcaacctcatgctgataatgcgcgctgcgccgggacgccaccgtacgatggccgacaatgccttcctgggcgctgggcgacggcgtaaagcgcaggtcgaggtcgccgaccttggcggtgaactcacacagcgcccgcacggccacgctgtaactcaagcgggttgctccgcccagcgcacgtagcaaacggtgaccggcatctggtattcgccgcagaatgccagccaacgcaactggttgtcttgcaggcggtcgccggggcccttgacctcgatcatgcgataggtgttttgcgccggccagaactggatgaggtccggcatcccggcccggttggcacggatatcctgcaacaggcgcgtaaaccaatggcgcaaatgctcggcgggcaggcaggccagggcttgctccagcagttcttcgctgagcaggttccagaacacaaagggcgactgaatgccccatttgtccatgtagcgttggcggatgctggccttgtagcgaccgtcctccagttgcgcaaagcacgcggcaaacaaggcttcacggcgctgataaaagtcctcgctgtgcaagtccgccggcccgcgctggaacgggtggaagaacgcccctggcagcggtgcgaaaatcgcttcccagcacagcaagccaaacagcgaattgatcaggccattctcgacgtaatgcaccggcgcatccggttcactcaggtgcgccagcacacaggactccaccgacagcagcggctcctgcaccagcgccaggtccaggcgcgccaccgcttggggcttggccctgggcagcgccggcccgccaagtttgcggcgcaggcgcggcacgacgcgcagcaggtgttgttgttccgctgcgctgtgtggggcctgttgcgcctcgctcgccaaggccatggcttgggcgtaatcctcctggcgctccagtacgcggatcagccgcgcccgcgcgccgggataagtgcaattgcggtagatctgttcggccagtgccagctcggcgcaacgttcgcaatactggccgatctggaacagcagcttggcgcggcgcttttccagccaggggttgccggtacacagcgtggcgacctgtgccaacaccgtatccaatgcctcaccggcttcaaaggcttgctggcaatggtgcaggaacagaaacccgtgcacgtcgtcacggctgcgtaaaccgcgagactcggcgcagaactcgactttttcataggtgtagatacccaggtccgccagcacgaactccgaccagtcttggtgcaggttgccgaagaacatcaggcgcaggcgatcacataactccattaccgtcaggctatagagcacatcgtccacgtcggggcaccactgggcaaagctgcgcgtttcggtaaattgcgcggccaagggttcaagccaatcggccttgttggccttgggttgatcgatccagggcctgaaggcgccgagcagttcacttttttgcagcagcgcaaacagggtggcaaacggcagcgggctttgatcctcgacccatcccaactcacgcaaaggccgcgccgccgcatgagggcaaccgatttccaggtaatggagcttggcggcacgaaaatgcacgcccttgcgcatcaccatccgcaccaacaacgcctgggacgcctggggcaacctgtcaaattgctgaatgaaatgctgttcgtgagcatcgagcaaatcggcatagcgttgccccaaccacaccagcacttggcggaagttatgcaggtaatacaaggggtcttcgaggggattggccatggcgcaaagcaatcaagtactggttatgcatacagagtgccggggcaaagcggttgttgcaatcagtaatagataaatggcgcctgcaactttttgcaaaaaaacaatctgatgagggggttgatcaagtaatatttatggccgcgcagccagacgctgcgggacttttcagggttaaaggtaagggttatgaacatgaagaatttgggtctgccactggttgcactcacttttctggtattagccggttgctccacgcaaaccgtagtgaccttgcaaaatggcacgcaatatttgaccaaggacacgcccaacgccaagacggccgacggcttctacgagttcaccgatattgccggcaagcgtattcgtatcaaggccgatgatgtggccacggtgcgtaaggaaaaatgatcatctagcaacaccccatcaaatgtgggagctggcttgcctgcgatagcgatttgtcagtcaccgcatggctgtctcgaccgccgccatcgcaggcaagccagctcccacaccgaatacgttagctgatgactatcccctcccccgacagactgctcacacccaccagcgtcaccgaatccgtaccaaaactaatgacggtatccccgcccaccaccttggcgtgatcgcggtaatcattgctgcccgccacatcgttgaacaccagcttgtccgtcgcctgatagccaatcacccggtcattgccaaactgcccgctgaacaaaaacgtgttatgcccgctgctgtcgcggatcgtgtcattgcccttgccgccttcgataaagtccgcgcccctgccgcctttgatcaggtcgtcgccgtcgctgccgatgatgaaggtattgcccttgtgcgtctctgcattgcggttgaggtcttgcacccaggtggtggcccgtgccgggtcggacaggttggcgacgatcaccgtggagtcgcgggtcatctgctcgtagaagcccgaatcgaggatgcgggtcatgccgtcgccgtaaccggtgggcaagtgcgagacccaggtgggcaggttgaggatggaaaacggcagcacgttccacagggatgaggcgtagtggtcgttgaagctgacgatgttgtcggtgctcgattcgtggggtttgtcgtgcacgcccagagacgacaggttgaatgacgagccatccagggcgcggaacaccgggtcgttttcatagccgacgttaagcaccttgtcgccggcgctctgggtcggcgacgcgtaggccacgtagttggagtccttataaaaccctgaccaggtgctgtcgctcaaatcggccatgctgttgaccgccaggccccccaggctgtggccgctgaccacgacgtcattgccgctcaggccctgggcgctggcgtagtccgccacgttcttgagcaagccgccaaaggcttcgcccgcgtagttcttggcgtaatccttgggcccgaaggcggcgagcaggtcgctgatcacatcgccgatggagtcggtgatcacactttcccgaggccccgaagtgccgcgaaaactgatgccgagttccagcagtttgccagcgtcatcatatttgcccagcacctcggcctgcgccgtgccgtagccgaatttttcgccaaagaaggtgccgcgttcatcaaccttgccgctgtagcccagggtgctggcgctgatgggcgtccagccggctgcttgcaccgcctcaagggcggctttttccgagtcggggttccaggggatgccggggatgaccccttgggcgttggtgccgccaatcagcgcgctgaccagggtggcgggcaggcccaggccgaggccgttgttctggtagccgacggcaaagccgttatccaggttgtggtaggaatacagcgtgatcgccatggcatcggcgaacagcgccttggagtcctcggtaccgaggtttttatagtcaaagatacccattggtagtgcctctctgttgttggatttgtagagaaagccaaaacacctgttatctgttaccacctgtaggagcgagcttgctcgcgaaggtcgtcaacgatgacgcgttctacctgaaggaacgcggcgcacttgagtttttcgcgagcaagctcgctcctacagtggtttttcaaaactttagaacgcccaatccaggctcaagccgacgccgtgcaccttctccttgctggccagcaggccgttgtaatcgaagttcacccgcgcatccttgctcaaggccaggctgacccgtgccccgaccaacgcagcatcgcgcaccattggcgcactttccacagcgaacgaagggccgcccgaggcaaacgccaggtgctgctccgaatcggtactgctcaggttgtgctgccagcccagggtgccggagacttccagttgctggtgatcgttgatattgaaggtcttcaaggcgcgcatacccagggtgctgagcaccaggtcacggctgtcatcgccacttctcagcgcggcggcgtcgcccttctctttgaagctgtcagttgccaggtgcacgtaggccagattggcgaacggctccagggccagcggttgcaggttgatgcggtacgcagcttcggtgaacacctgggtgctgtgggcatcgaccttggccttttgcttgccgctgacgtcgccgtattgcaggtcgcgtttgacatcggcgcggtgccagctgtaggtcgcgccgccactcaggcgccaggcgccgatttcatgcccggcataggcgccgaaatggtagctgtcgaccgaagcgcggctgtgggtgccgctgcccatgttcagcgacgtgtcgctgtagccggccaccaggccaatgcgtgtggcgtcatcgagggcaccgtccacaccggcgagcatgccgccgatggaggtggtgtagcccgcggtgtcgttgcggctgtcggtcttgccccatgcgcccagtgccttgacccacacgttgccacggctgtcgatggcttggctggcagcgcccatttcaccgttgcgcaggcgttcgcccacggcttcgcgcacgtagcggctgtcattgaccagcgcggtttccagcgccgggtaaacctcgccgctcagttgctggaacgcgccctgggccgaggcggccgtgggtgccagcagcaagctttcatacacaccgttgcccgcgcccaattgctcgacggcgccggccacggcgcgctggttcggcgtggcggccacactggtgaagctgttggtgcgtgccacatccagttgcacaccgttggcggcgtagttcaaggtgccgccgacaaacaggtagttgggcaccactgccgcgaaactgccggtgacgccacctgccgcttgcaggatgttgtactgacggccgatcaggctttgggcctgggtggcgctcaacaaggtcgggctattttccagggccagggtcacggtgccgccgttgagggtggccgtgccgccggcgacgatgcgatcgctgctggtgggcgacagttctaccgcgtaggtggaacccggttcaaagttgacgttgcccgccacgttcaaggtgccgatggaattgcccggcgccacggtgccgccgctgttcgcgctcagcgaaccgatacgccccgaaccaccgaccacgccgctctggctcacagtgacgtcggaggtaaccgaaccgttgatcgccagcaagccctggttgacccgcgtcggcccgctgtaggtattggcgccggtgagcaccaaggtaccgatgccctgcttggtcaggccgccatggcccgagatgtcattgctccacacatcgcgcccgcagtgcaggtcgtcgcacacacgctgggtgggtttgccggcatccaccaccgcgccgacacccggcaggtccgcgacgaactggccgctgccgtaggcgccgtcgatacggaactcggccgggatatcttcagcggtgataaacatccctgggccgttgaccgctttgcccaggttgatcatgccccagccgtacaacgagtcgatgcccggcgcgccgaggtcggtggcggtggtcttgagcacggtggaaatctggtcgccgctcatgtactggaagcgctccatcagcaccgctgcggcgcccgccacgtgaggtgcggccatggaggtgccatttttgttggcccagtcggtggtgaggttttccaggctggtaccgttgatgatggagctgtagatcttggtgccgggtgccgatacgcagaagctcgccgcatagccacaacgcgaggagaacgtactgatcacatacggatcggggctggcggtattcgggttctgctggagggccgcgacggacagccagttaggcgcgatctctggcacaaaatacgcaaggccggaaatcgcatccgggttgttgaggttgtagtcattgcctgcggcaaagatggtcagcacaccgctgcgggccgcgtcgatggcgccttggtacgcaccacctgctagggtgccaaggatcggccggatggtattgaactgcgcctgggcctcgttgacggtgaagttggggaacgccggatcacggccccctttggcgtactgatcaccgatgccgatgccccaactgttgttgatgatgcgcgcgccactggcgaccagcccatcccaaccggccttgtacacggcgccgtcgttgccaaggatgatcccgtcttccggccccgggtcaccgttttcggcggtgaggatctgtgcgttgaacgccacgccatgcatcggcccgccatcgcggttaccggccgcaatgccgccgacgtgggtgccgtggttacccaatttgccgttggagtccttggacggcgtgccgtcgtagcggaacgcgtcgcccgccttcaccgggatatacggatcggtgtattggcgaatgccctcggtgacaatcgtcaccaccttgtcagggctggcgaactccgggtgctgggcgtacaccggctggtcgaagatccccagcttgacgcccttgccggtatagccagccgcataggcggtgtcggcgtgcacggcgcccaggccccagtcggccttgaactcattgctgcgccagctggcggcgtcgcccagtttgccggtttccacatagggtgcagcctgggcggtccccaggcttgccaggcaacacaacaacgcgccatatggcacgcagctcagcgccttgagcggatagcccgggcctgtgtggatggcggtagttaaccctgacttgcgttttttcacggtgaccttccttagttttcttattgcacgtgtgtaaatcacttctccagaacaccgccgctgatcgttcccacgctccgcgtgggaatgcggccccggacgctctgcgtcccaaagcgtgacgcggagcgtcacaagaggcgttaccacgcggagcgtgggaacgatcagcggagcgtgggaacgatcaggttcgctgtgtcttcagaactgccagttcaggctcaagcccacgccctgggttttcgcgcgcccacccagttggccgttgtaatccaggttgacccgtgtcgatgcattcagcgccaggctggcctgcacgcccaccaaggcagcgtcgcgcagcaatggcgcactgcgcacggcaaatgaaggcccgcccgcgacaaacgccaagtgctcttcggactccaccgccgtcaggctgtgttgccagcccaacgaaccggacaggtccagttgctgatggtcattgagggccagggttttcagggcacgtacgccaagggtgctgagcaccgcgtcacgccggtcgctgccgcgctccagggccgcggcatcgcctttttcgtggaaggactcgctgttgagatgcacataggccaggttggcgaacggctccagcgccacggcttgcaggcggaggcggtacgcggcttcggtgaagacttgcgccgtggtcgcgtccagcttggttttttgcttgccgctgacatcaccccattgcaggtcgcgcttcacatcgccgcgatgccagctgtaggcaccgccgacgctcaggcgccaatcacccagctcgcgcccggcgtacgcgccaaagtggtagctgtcgatggatgccgatgaatgggtaccactgcccatgttcaaggagctgtcgctgtaaccggcgaccacacccacgcgggtctgctcatccagcgcgccatccacgcccgccaacaggccaccgatggaggtggtggaacccgccgtttcagtgcgtctgtcggtcttgccccaggcgcccagtgctttgaaccacaggttgctttcaccggtcactggcacatggcgcaggcgctcgcccacggcattacgcagttgcaggctgtcgttgatcagcatcgcacccacggcggggtagatttccccggacagttgctgcaagccctgctgggccacggtgaccgattgcgactgcagcaggctttcatacaccgggttgccagcgcccaattgctcggcggccgccgcgacgttgcgctggttgcgggtggcgccgacgctggcgaagctggcgtcgttgcgccccacgttcagttgcacggcattggcggcgtagtccagggtgccaccgaggaacaggtagttgggcagcacttgcccgaactggccctgaatgccgcccgctgcctcgagaatcgagtactgccggccgatcaggctttgggcctcgctctggctgagcaaggtggggctgttttccagcgccagcgtgacggtgccgccgcccagaactgcctgaccgccggcaacaatgcggtcgctgctggtgggcgtcagttccacggcataggtcgagccggcgccgaggtttacatcccccgccacctgcaatgtacccaccgaattgcctggcgccacacggccgccgctgtttaccgacagcgcggcgatacgtccggccccccccagggtgccgctgtcattgaccgtcactgccgaagccagcgagccattgacggccaacagtccgccgttgaccagggtcgcaccgcgataggtgctgtcgccgctgagcaccagactgccggcaccggccttgatcaggctgccttcgtacacgcggttggcggcggcctggtcgcgggcattgccgatggcgtagtcggtctggtcctgctggctggcagtggcgcccacgccgttttgccaacccttgtcgatcagggtttgctgccaagccgtgtgttcggcgcggtcctcggcctggcgctggatgagcgcctggtcggagatgccgttgctccacacgtcagcctgtccggctgccaggttgacctccatgggcccgagcagttgccctgggccgtgcatcgcccggcccaggtcaggcacgccccagccgacgatggcgttaggcgcctgggtgatcgagccgtcgagctgcgtggcggtggtcagcagcacctgcaaggcttgctcgttggtcatgtaaggataacgttccatcaccagcgccaacgcgccagtggcatggggcgctgacatcgaggtgccggacttcaccccataccccccgtcgggaatagtgctgttgatcagcgcgccgggggtagaaatacaccagtacttggcgacgccgcacttgttgtatttctggttgttggctttatccagcccggatacggccagccagtggccttccagttccggctggaaatacggcaaggccgagcgcacgctggcgttggcatagccgctgttgccagcgctgaacacgttgatcacaccggccttggccacgtccgccgcagcgtccagccaggtgccccggttgtaatgctgggcgtacgccgcatgcatgttgtccagggtctggtagctgacgtccttgggctggctgccccagctgttgttgatagcgcgcacgccggagtccaccaaagcggtgtacacggtcttgaagtatttggggtctggcgtggggccgaacaggaagctgtcgttggcgttggtgttgcccacaaagacttgcgcgttgtaagcaacgccatgcatacccacgccgtcgcgggcggcgcccatggtgccggtgacgtgggtgccgtgggaatcgttgttcgggttgagcgcgccggtggtgctgaaggcgctgccatcgacataggtgccagtggcggtgaccgggtggaaacggtctttggcggcttcggggtgattggcatcgaaccctgagtccagcgcgccgattttcacgcccttgccgctgatcccggcggcgtaggcttcatcggctttcatacggcccaggccccagtcgctctggtactcggtcgagcgccagctggcagggttacccggttggccggtctcggtgtattgcgcctgtgccgcaacggacagcaagagcaaggaacctgcggtgaagggtttgaaacgtggtgaatcggtgatcatgtgcacactccctattattgttattccccctgtaggagcgagcttgctcgcgaagcactcacagacgccgcgtgcatccaggttgcccgcgttatcgttgacgtttttcgcgagcaagctcgctcctacagttttccatctgggccgaaggcttcgtccactttggccaagtcggtgtcacgcaagttgcccgcgtagtagtgcaatttggtccaggccatcaagtagtcataacgcgcctgggccaggtcgcggcgggtgctgtacagctgctgttcggcgttcaaggcgtcgaggttgacgcgctcgccgcccagaatgctttgcttggtcgacaccaccagcgcctcggcggatgccagcgctttctgataggcgcgcaacttgctcacgcctgacaggcacgcactgaactggcgacgcagttcgatcagggtttcgcgggtcttgccttccagctcgtactcagcctgctccatggcgcggctggcctggcgggtggaggccgagataccgccaccggcatacagcggcatgctcacttcgacgccgatggtgttggtgtcgtagcgctggttataggtgttgccgctgtcggactcctgcttgcgcgaggtggcatacgcggtgattcgcggcaaatgcccggcgcggttgcgttccacttcataacgcgccacttccagggactggcgctgcgaagccagcaccgggttgttggtcaatgccaactcatgccaggtgtcgtagttggccggggtcagggtgaacgcggcaaagctctggttcagcggtgccaggtcgttgatgttgacactttgcacaccgatcaatgcgcccagttcccggagcgaggcgtcctgctcatccagggcctggatctcttcggcggtggccagctcatagcgcgactcggcttcaaggatatcggtgcgggtgccctcgccttgctggaacagatggcggttctgctggaactgttgctcgaaggccttcttcttggccctggcgatgtcgatctggtcctgggcaaacagcgcctgggtgtaatagctcaacacccgcaccagcaacgcctggctcttgtcgcgaaagctctcatcggcaaacagcgcctgggccacgcccttgcggtagttggcataggcttcgtagtcgaacagcggctgttgcaagctgaaggtcgagccgtagctgttgtagttgcggtcgtcgcggtaactgccgccgcgcccgtcgggcaggtgcgcttcggaattgttgcggcccttgttgtagttgtaggacagccgcggcagcaagccggcgcggccaatggtgcggttttccaggccggcgtcgcgttccttgatggcgccgaggaataccgggtcgttgcgcagcgcctgctcgtacacatcgaagggccccatggctgcctgggcactgccacacaccagcaacagcgaaatgaacactggcttcatgctcattcctcggtcaacgcggagccggcgcgatccagcagcggcttgaacagatagttgagcaaggaacgctcgccggtgcgcacgaacatctcggcgggcatgccgggcttgatcaccaggccgttgagtttttccatcgccgcctcgctcacgctggtgcgcagcacgtaatacggcgcgccggttttttcatcgagcatctggtcggcggagatcaggctgacttcgcccggcacccgtggagtgcgactttgattgaaggcggtgaagaggatgtcgaccggcaagtgcgtgccgaccttgtccaccaggtgcacgggcaaatgcccttccacttccaggcgcgtgccctggggcacgatctccaacagggtttcaccggcgcgcaccacggcgccttcggtgtgcacgctgaggttgaccgcaatgccatcggccggcgcgttgatttcgctgtgctgcaggttgaagccggcggaggtcagttgctgctccagggtcaggctgcgcagttgcgcgtcggccagttggctgcgcacttccttttgatattcctcgctgtgctgctgcaacttgaggcgagattcgacaatgccctgctctatccggccgctttccccggcgttttgcgccaggtcctgctgcacctgggataactggcgctggtagtccatcagccggttgcgcgggatatagccgttgtcggccaagggttgcaggttgctcagttgcgcgcgcagggattgggcctgtgaggtcaggtcgctgcgcgcacggcgcataccacttaactgagaggtggcgccttcgatgctggcgcgaatcccggcctgttcacgggcgaacgcgtcgcgacggctgctaaacagctggcgctggccttcgagcaccagcatcagcgcgggatcgggattggcgctcagttcagcgggaaaggtaatgccgggcaggttgtcacgttcgctctcccagcgcgccacactggcccaggccatgcggtactgggcttgcagcgattgcacatcggcctggttctgggtctggtcgaggcgaaacagcggctgcccttgtttgaccagttcgccctctttcaccaggatgcggctgaccacgccggggctgaaggtttgtaccgccttgcgcttgccagacaccaccacggtgccttggaccggtatgccttgatccaacggtgcgaggctggcccagaggaaaaacccgccggcaccgacaatggtcatcacccagcccatttttacgaaaaagccggcatcgcgttctttgctacgaggttcaacagtaaggctgctcatgcgcctggattccttgcggccgggtactgacgactgaaactgacaccggttttttctttcggcgcttcctgctgcccggacaacgcccgcagcacctcctggcttggcccgaatgcctgcaactggccttcgccgagcaccagcaatttatcggcctgggccaatgccgaggaacgatgggtgactagcaccacgctgctgccctgggctttcatttgcatgatggcgctggccaatgcggcttcgccgacggtgtcgaggttggagttgggctcgtccagcacgatcaggcgcggcccgccgtacagggcgcgagccagggcgacccgctgtttctggccgccggacaagccaccgccgttgtcgcccagcacggtgtcgtagccctggggcaggcgcaggatcaattcatgcacaccggcctgttgcgcggccttgaccaccagctccgggtcggcctcgcgaaagcgcgcgatgttgtcggcgatgctgccgctgaacagctcgatgtcctggggcaaatagccgatatgcgggccgaggtcgtcgcggttccagcggtgaatatccgcgccgtccaggcgcacggtaccggccagggtcggccacacgcccaccagcacgcgggccagggtggatttgccggagcccgacgcgccgagcacgcccagcacttcaccggcggccaggttgaagctgacctgatgcagggtggccatgcgtcgccccggtgggccggcgctgacctgctcgaaactgacctggccgtggggcgccggcaaggccatgtgctcgacctctggcgggaattcgcgcagcagctcgtcgaggcgctggtaggccagcttggccgaactccattgcttccacaccgcaatcaattggtcgatggggctgagtacgcggcccatcaagatggagcctgcgatcatcatcccggcggtcatgtcgcccttgatcactaggtaggcgcccaggcccagcaccagtgattgcaggcacaggcgcagggatttgcttaaggaggtgatgatcgaaccggtgtcgctggcctggttctgcaagcccaggaactgcgaatgcacgccaaaccagcgttggcgcagcgcgccgagcatacccatggcctggatggtttcggcgttgtgcaaatggctggtggccagttgggtggactgctgcgaatagccgctggcctcgcccaacggctttttagtcaagtattcgttaaggcacgccagtgcgatcaacagcaccgcgcccgccgtagccagcacgccgagccacacgttgaacaggaaaatcacgaacaggtagatcggaaaccacggcgcatcgaaaaacgcgaacagcgccggccccgtgatgaattggcgcagagcggtcaggtcgcccaaggattgcccggcatgcccctggccgcgctgcaggttgcgctcgaacgcggctttgtacacgcgcaagttgaaacgccgctccaactggctgccaatgcggatcacgataaagctgcgcaccacttccagcaggccgataaacgcaaagaagcccacgaccatcagcgtcaacatcaccagggtggtttcattctgggaggacaacacacggtcatacacttgcagcatgtaaatcgagggcaccagcattaataggttaatcagtgccgtgaaacagccaacgctgatcaaaatactcttgtattcacccagcgccctgaataagggcgccaccccatgggacttcgccatattaattgtttttccttgcagcgaattacgcaaaagggtcacccctaccaagtagggtacggccgcctaacaaatcgagttatatgcttataacttttaattaaggtttacgttgcagcgttacaacttcgccagctttggtgcgggcttgatagtcgccctctttctggcgatttaaatgggtgatccctgagccttcagcgttaaacagccagataccatccggcgtgggtgaccatgtctgcggcttgtcgcccagccactgctcggcacaagcgatatcgcccccaagggcattggcttgctccactaacttcagcacgcacacctgatcctgctgcttcagctcccactgcccggcaagctgcgcggaggtgggtaatacaagactgctagccattgcgtgggctcctgccgacacgaacaacacctgcacaacacaggcgatcaaaggggaaaaacgtggcatatccaactccagccaggagcgcggcgccgaagcgccgcgcgctttacatcaggctacgatgtcactggcagccgcctggccaacggtggtgacgaggaaatccgccacgccgtgcccggaaaagtccacggccaaggtgcccaggttggtacccgaggcatagctcagtacagcatcgccggcatgcccggtaaaggcgttgacgaaggtcacgcccgcacccttggtgataccagacaggtcgatcttgtccgaaccggacgtgaagtcgaagatcttatccgcagcccctggcttggagtcggaactggcaccgtacacgaatgtatcgctgcccgcgccgccccacagttggtccgcaccgccgccgccgtagatgaggtcgttgccggccccgcccttgatggtgttggcaacttggttaccaataatcaggtcgttgcccgcgccgccgaatgcgttctcgatggtgacgcccttggcgatggacacgttgcccaccaggccgcccacatcagagaacgaggtggccgtgaggttgatcttctggttctgggtgaaaccggaaaagtccagggtgtcgttgccgccaccgtcccataccgagaacaccagcttgtcggcgttggacgtggcgctgaggaaatcacgcccggtgttggagttgaacccgtaggtggtgtccgtggcgcgggtgctgaggttggcaccgtagagcttctggatcgcggcaatgtcgtcgatcagcgggccggaagcgtaagcttcgacgccgcctttgctgaagttctggttggtgttgctctcgctccagtaactcatgaggctataaccacgcgtgtcctgtccataggttgcgtcgttataggtcgggttgccgttcccggcgttgtagtcgccagggtgagccaggcccagggtgtggccgatttcgtgggtcagggtctgccggccatagttgttcaggtccggggtcttgttcggcgtgtagctgttgtttgtcaggtaccacgaggtgccgtcgtagcctgcaccggtaccgggcaggtaagcgaaggccgcggcgccgtcctggccactgctgtagttgccgaacgtcatgtggccgtcaccgccggaagccttttcggtaaaggtcacgttggcaacatccgcccaggattgcatggccagtgcggcctgtgctttctgctgggtgttgaactggctgaaccccgagatgccatgtttgttcatggtgctctgggtagccgaggtgaggaaggtgtaggtcagatcgatcttgccgttgccatcaaagtcccggtacgcagcaccatcccgcagcagctgggtcgctgcctggtccacggtgtaggacggtttgccattgactgtgaggttaccgccacggtcatacaaatggctgaagctatcgatttgcgagtaagcagtgctggcttgcgcggcagatacaatagctttgtcttttacttttgacataaacgtacttccttgtttgcaagtgcatcagtctttgttcgataggaacctcgcgggcgaggatagtcctatcactcacctcttttgaaggcgtaagaaaactgacacaacttgaaatctttcgtctacatctatttccatcgcacaattgtgacgcaggttcaagttgcagaagtcccacgcagtgtttattgggggccgttgcgtttgtgtggccgaatcggcgctcaccactatttaaatattaaatacaagtaaagccactctaagtgagcggccgacttgattaatggatccaatatattgtcacggtgtcattagcaacattaaagagccactattcgcactattaaagtgcgctgccccccattaccgggacatactccagccacactgttgcagggctgccaagagggtttcgccagccaggcccggcaccttgacgccgtcctgggtggtcatgtcttcacccgccagaatggcgttgatgatcgcctcctccaccgcctctgccgccgcgctgaacagcggcgaaatatgatcattgttgaccatctgcaagccggtgctgagcggcaggtccttgcgcccatagtcggccggtggcaaatcctggttaccggtggcaaaggccaggaacaggtcaccactggaatcctcggtgcctccaccggtgcgcgcgatgccgatggacgcacgctgtgccaggcgctggcactggtggggcagcaagggggcgtccgtggcgatgatcaccacgatggagcccatgccgggggtaccttgctcggcaaagggcgaagcaatgtccatcaagtgacggcccaccgggtagccatcgacccgcagctcctggcgcttgccatggttggcctgcaccagtacgccgacggtccagccgccctgctccgctggcaaccgccgtgacgcggtgccgatgccgcccttgaactcatgacaaatcatgccggtgccaccgcccaccgcgccttcctgaaccgagccgctttccgcctggtccagggcctggcgcacatgctctgggcgcacgtgctggccccagatatcgttgagcaggccatcgtaggtttccatgaccaccggcatacaccagtacaccgccgggtccgccagccgctcgcgctccagggcgatcaggctgtcgcgtaccaccccgatactgtgagtgttggtgatcgccatcggcgtggtcaacagccccgcctcgctgatccattcaagccccgtggcgtcaccattgccgttgagcacgtggtagccggcaaaacacggttgatgccgcgcttccccggcacgcggctggatcagcgtaacgccggtacgcacctgcttgccgtcgacctgcgccttgagcgtggcatggccgacgcgaaccccgggaacatcggtgatggcattcaattcgccgggcatgcccaaccccaacgtaatgcccaattgacgtgcacgcatacccactccttacagtttctgaaacgccggactcaaccggccactgatgcaatacaaaatcaccgacagggccagcaagccgatgatgatcatgatgtcgcgtaccgaggcctccaggatcaaggtaaccagcaggtaaccggcaccgagcaccgccagcaatgccggcagcggccataacggcatgcgatagggatgctcgcgatcacgcagcagcacccggctcatcagcgcgctcagcgccaccaccaggtacaccagcatgatcagcagcacgctgaatgaggtcaggtcggccaggttagagctgaagctcaacagcgccgagggtatcgccaggaacagcgtcgccagccacggcgagtcccagcgcgggtgaatacgcgtgaacagcttgttgatactcggcgtccacagcgcatcgcgaccgctgctgaacaccacccggccaatctggatcacgatggcgacgatcgcgttgaacaccgacaggaaaatcccggcactcaccagccgcgacaaggtttcattgccatgactggtcaacaggtagccgatcgggtcggggctgctgatcatctcgctcagggacggcgcgccaatcaacagcgctgtgatcggtaccaactcgatgaccaccaccaaccccagggaccagagcaccgccttgtgcacgcccttgccgccgcacttcatgtcttcagccagcaacaccgccgggccgtagccgttgaacgagaacaggccaatgccgacggcgccgatcaccaaggcccaaggcgccaggtgcaacacgccgttttcgacgatctgcggctgcaacaacacactggccggctgcaccggattgccgaagccgatcaccacgatcaccagcaacgctgccacttccaacagcaggcaggtgccggtaatccaggcgttgagcttgatattgagaatgcccagggcgtagctgcacaccacgatcaccagggcgaccgtttgcgcgtcgaacttggtgcccagggcgttattcagataagtcgccgcaccggtggccaataccggcgggataaacaacaacatcaccagcaccgtcaggaaggtggcgtaaccagccatgccgccaaatacgcgcttggcatacacatactcgccgccggcgctgttatgggcgcggccgagttcggcgtagcagaaggcgaacatcaacgcgagtagcgccgccatcacaaacgccaggaacacgccactgcccgcctgctggatggcaaacggggcgatcacaaagacggaactggccggcgttaccgctgaaacggtaatggctactacatcaaagacgctcagggtgggcttgagcacgccatcgggcgcgggggtagcactcatatcgttatcctctgtcgttgtttttggtgtgaggcagaaacgaaaaatgatatttgctcgggatatgcttcccgttgagtagtggcgacgttatcggctgacgggcctgtcggccaattcccctattggcgtactccccttgacggtgctcgccagaagcctaacccttggccgatcattttagggtggggatggttggatgagcctgttccgggaagtgggtatgcatgcggggttgggccgcaccttgtctcagatcggcaccgagcggttctggaagcaactggtgctgttgttgcaccaatgcctgcccttcgataatgccctggcgattttctacccgctggatggcccgccccaggcattggaagagtacgacgcccaacccagcagcaaaccggcatcgatgctggtgtacctcaacggcctgtacctgctcgacccgttctaccaagcctgccgcgagcactatgccagcggcgtataccgcctggaggaagtggcgccggatcatttccgccagagtgagtacttcctcaattacttccacgacaacgtgctggaagacgaggtgcagttgatcctgcaattgcctggcgccggcacattgtcgttgtcactgggcatgcagcggcgcttcagctttgaagaaaccgggctgttgaccacgctgtcggcctgggtgttgccgctcatgcagcagcattggcagcaaagcacccagcgggcgccggcgatggacagccagattcgcgatgcgctgagtcatttcggcagcggtgtgctgtcggaccgcgagctggaaatcgcccgcctggtgttgcgtgggttctcctccaaggccatggccgaacgcctgaagatctcgccggacacggtaaaagtgcaccgcaggcatttgtacgccaagctggacatctcgtcgcagcccgagttgttttcgttattcattcagtcgttgggccatgacttggagaacccataggcttaatcctactgaaagaaattaatatgctccggcaagagatttaccccgtccactcgcacagaaaagttcggcccttcagggttaaccttgatattcaaggtgcttacgccaaattcgtgggtcagttgcacatcacccacgtccacgggcgggcctgtttggatattaatggctgagatgttgttttcttttaaaactccggacacatcgatctcatcctcctttgggttgaaattcaagatagtgtctgggtcatcgccaagggagtcggtgcttttttcatatttgaatgtattctcaccttggcgccccaccaactggtcggcaccaccgccgccgacgagcaccgagggctcgccgcgcttggcttccaggcgctcacgctggtctgtaccacgcaaggtcggcgggctgttttccggttgggtccacgtgccgccagtgggaaggctttgtattgaggacatataagtcacctgtcagataatgagtgtatgtgaaagtgttacgcgctgcggatcgaaatttctcacgcaggcaataacactttccactcgaaatacttgacattaaatgtcttaaatatgacgttattatttattaaggtcaccgccaatagcgcatttatcatctgggcgccagggctgctggcttatacttcaagccagcggcttataaatgtgaccgccagctaatcatccctcgttcggatggcattccctacccgagcacccacgtgatcgatactcagcggtatggcttacctgatcgacccggcatcaaccaagactttaacgacgactgaagaaatcgatatgctcaggcaacaatttcatggcatcaatacgaacagagaagtctggcccatgggggcgcactttgattgtgagtctactgtcgccaaaggggctatgtatgatctgtacatcacctattttctcgggcggctcattccgaattctgacttccttcaccttgtacttacttagcagttttgatacgtcaatcttgtcctccccaggatcaaaattaaagataacatcttcgttagtgcgagaggagtcggagagcttttcatacttgaaggtatttgcaccccacgctccccataaatggtcagcgccgccccgcccgataagcacagacgcttcgccggggacggcgacaagccgttcagcacggttttcgccccgtaatacgggagtatgagagaccggtgaggtccaggttccaccgataggaaggggggcgtatgtcgtcatatttataaccctttagtcagttttatgttgaagtactacgcatatttcagtacgcaacgctctcacattcccccctcatctcccagccattatctttaacacatcatttcaagaaattgacactgtacatatctcgcaaccgttcattcgccctatcaactttatagtgacttaacaatcccgaaagagctccctgttgcgagcatttatttcaatggcagtatgctggtatggcagtttaattatgcggacaccttaataaagtccgcactattaaaaaacactccatgccagcacacgaaaggtgtgaattatcgccctgtgcgaatggtgttccaaacccgagtacgcacccggtcgatattcaacggcatggcctccagtgcaaataacttgcccatcatttccgcgcttggatacacctttgtatcggccttgatcgccgggtctaccaggctgtcggccgccgcgttgccgttagcgtagtgcacgtagttggtgatactcgccatcacgtcggggcgcagcaggtagttcatgaacgcatagccggctttctcattcggtgcgtcgacgggcatggccaccatgtcgaaccagatcgctgcgccttccttgggaatgttgtagccgatattcacgccgttcttggcttccttggcgcggctttcggcctgcaggatatcgccggagaaaccgacggctacacagatatcgccattggccaggtcggcggtgtatttcgaagaatggaaatacgccacgtaaggtcgcactttcatcagcagggcttcggcctttttgtagtcctcggcttttttgctgtggtgcggcaagcccaggtaattcagcgcggcaggcagcagttcggggccgttatcgaggatggcgacgccgcatttttgcagcttggccatgttttccggtttgaagatcaagtcccaggagtccaccggggcattgtcgccgagtaccgccttgaccttgtcgatgttgtagccgataccggtgctgccccacaggtacgggaagccgtgggcattgccagggtcgttattttccagggccttgagcagcaccgggttgaggtttttccagttgggcaactggctcttgtctagctttttcagggcgccgccctggatctgccgagccatgaaatggttggaggggaataccacgtcgtagcctgatttaccggtcatcagcttgccgtcgagggtttcgttgctgtcgtacacgtcgtaggtgaaaccgatgccggtgtcttgctggaaatttttggtggtgtccggtgcgatgtagtccgaccagttatagatcttcacagtctcagcggcctggctgatagaggccaccaacatcaagggcaacagggcaatggctttcatggttcgatttcctggcggttttagggctttttatggcaggcgatcaaggatcaaagcgttacagaatcaggacataggtcttgcgcacggtctcctggatatcccagataccggtgctattggctggcaacatcagtgcgtcaccggcttgtatgtgcagggtttccccgttatcaggcgtgaaggtgcagcgcccttggatgaaatggcagaactcctgggacgtgatctgccgacgccagcgccccggcgtacaggcccagataccggtctcgacgccgtcgttgcgctccacgctcagcgtggaggccacggcgatgggctcgcccaggggcgccgccaccggtgatgaatccggcagaggggtgttcagcgtgtctttgaattgggtgatgctcatgggttttcccctgtgggtggaacgacttagtgcattaaaccttccatgaaactggcaatgccggtcgccagcttgcgacgccagggcgcagtgttggggttggccaagacctgatcttcatgaacaaaactgcgaatgatcgcgttgtagcccagccagcggcacggctcgggctcccaggcctttagtgctttgaggccgccctcgcgaatcacccagggttgttgggtcagcaaggtgtcgcgacccaggatcaaatcggccagggtgcggccgccgaggttggtggcccccacgccctccccgccatagccgccggacagtgcgacgccggtgctgtggtcacagagcatgtgcggtcgaaaacggcgcgacatgccgaggttgccgccccaggagtgggtaatcctggcctttttcagctgtgggaagagttcgccaaacaggtagcgacgcaactccacttcgctgtcggtcaggtcgaagttgtgccgcaacttgccggcaaattgataaccgccacgggcgccgaacaccaggcgattgtcggccgtacgctggccgtaggtaacttgacggctgctctcgccaaaggcctggccttggctgagcccgatgtctgcccaggtgctggccgacagcggttcggtggcaacgatcaaactctgcaccggtaactgatagcggcccaacggcggcaaggtattggcgtaaccctcgacagcaggcaccacccaggcggcgcgcacgctggccttggcggtgcgcaggctgccggactgccaatgggtcacggggctgttctcgtagatggctacacccaggttctcaacggcccacgccaggccacgcaccagtttcgccgggtggatggtcgcgacgtggggggcatagatgccgccataaggcttggcaatgcggacctgctcggccaattgctgcgggctgagccagcggtagtccgcttcggtgaggccttgggcgtacagcttgtccagatagcggcgcaggctgccttcctgttcggggtagcgtgcggcgcaatacaaggcgccacctttgcggtaatcgcagtcaatgccttcgcgcgccagcacctgggccacttcatcgggaatgccatgcaaaagatcaaacgaagcgcgacgctgattgggggcaagccccgccagaagacggtcttctcccaagaggttgcccatcaaccagccaccattgcgcccggatgcgccgaaaccggccgtttgcgcctcgatgattgcaattttcagctcgggggcctggcgcttcaggtaataggcggtccacaggccggtgtagccggcgccgatgatcgccacattgacgtccaggtcgtgctccagcgacggccgcgccaccagcgggtcgtccagttggtccatccataaactgatactgcgccatgccggcatgccaggttcccctacctcggttcgatagggtcgatcctagagcgcagcgtcaggggctgtcttgcgcgcgtgcacgcagagaaatttgtttgaggtacgccttgggcgattgcccggtgtgctggcgaaaagcgctgtagaacgccgaaagtgaattgaaaccggcggcaaaggccagatcatccaccttgatgggtggtgtggcgcagtccagcgcggccagcaaatgctgaagtcgcgcctggttgacgtagcgatagaagctctgccccagcacttggttcagcaggtaggacatctggttgcgactgtagccacaggccttggcgacccgctgcaggtccagctccgggtccaggtacggttgctgacgctcgaaatattgttgcaggtcattggccatataacccaactgctggggcgacagacccaggcggctgaccgtcgggcgcagcgcctgggtcggttgctcgtgcaccagggacgcatattcattcacccgccagatcaacccgtcgcgcaccgtaatggcctcactggtacgaaacgacaccaggccctggccgccacgcaaggtaatgcggtactggataaacgccgtatcgccatcggcgcggatgcgatcggtgtgttcaatcgcctcgtctgcctcacggggcatgctggcctgcaagtactcgcgcaactcggcatagcccaccacacggttctggaaaaaatcgtggtactggatctcggggtgatagtaggccatcactccgtccagatcgcgatggcgccagcacaagtgatggcgcagcaccagcgcgccggtagcgtgggaattctgatactcatcgtctggagcgatgtcgggcatatcgggctctatcgcgggaaaaatacttgagactgccgaagtttacccgcctcttcaagagtcaaatcgagcgcctgactaatggccttttgcctattcctctgtaggacatgatccatatcaaaattaggcgaaagaaccgctgaacgggcccaaaaaagtcaccttgcagttgcgaacgaatgctatttttaagtccttatctgtcatgaccagtgaaggtcctggcccctgccgcgagctaaaggaagcgctcaatgaacaaggtgggcaacatgaacaaagtgacattccccaacgcctgccagctgatgcgctggcattttcacccgatgggcttcgagggcagcatggacgcccccggcagcatgatcgtccgcctgttcgaccgggccagcggtgagacgttgatcgctatcgcggggattccgtgcgctacggtgatgaacgcggctgatgttgagcgcatcatcgaggcagtggaggatgaattggagagtttcgtgccgccgttgtcgttgcgggcgtgaggtggcaatagcgtagtaacgccccactttgacggtaaccacgatgcgaagcgagtcgctcttgatcttgatctgcttttgatcttgatctgcttttgatcttgatctgcttttgatcttgatctcaggcgccccgttaaaccacgctggccgaatgcaggcttgaattcgtgggtaacccggcaggacgccgggttagccgccccgcgccatggatggcgcgtggcggcggcccacggattcaagcctgcgttcgggcacaccgagcctaggcgaggtgccgagtggtggggcaagagcgttttgcttactttgccgcttttgcaaagtgagccgctgtcagagcggaaccctaagcggccgttaccgcaggaatggatatgcactcggtataacggtgtcgactgtgaggccgtcttcgcgagcaagcccgctcccacatttttgatcgtggggtttcaggtagataggcgccggctggcaggccgcaatcgcaggcaagccagctcccacattttcgatcgttggggtgtcaggtagataggcgtcggctggcaggccgtcatcgcaggtcagccagcccccttcactgaacgctgatcatcaaaaaacaccttcctgccatccacccgctcagacgccctcggcacattcacaccctggccttccggcttctccacataccaataacaatggctgaccgcccgggtaatccccacgtaggccaggcgcaacacttcgtctctctgcgcattgtcataaggctcgctgtcgccatccttgcccaaacccgccatgcgatacacctgattcttgtacggcgaactggtgacatgctgacaatcacccagcaaaaacaccgcatccgcctgcaagcccttggcactgtgataagtcagctgtttaagcctgcgcgcctgaggcgccaagctagaatcaacattaactaccgactgaatatgttcctgaatcaataacttatcgctactttttcgataaagcatcaggattgaatcgccccgctgatagtgcttcagcaaccgctgccccagtgccgcgtcgtcacgttccaacaccgtgacgggcaccaatgccttgggctcgccactggccctggccttcttgcccgggatggccggtgcactgcgtacgatatgttcggcggcgtcgatgatgtgctggtggctgcggtagttctcccccagcatcacgcgggtagtgctgggcgaaacaaactccttgttgaactccatgaagtacttgggcgaactgccgcgccagccgtagatcgattgccagtcatcccccacgcacaacaaggatgagcgttgcgccccacgcccgacgtgcatggccggcccgcggctgcggatttcccgcaggctggcgcggatccaggacacgatctgcggcgacacgtcctggaattcatcgatcatcaggtgcgacatcggccgcaacagcggatcgctgagcagcttgaggttctccggggtgttttcgccaaatagcgagaacatccggttgtaggtcatgatcggcggcgattgttccagcaggtgatcttccagggccttccagaaaatgctcagagcctcgaagaacagccggtccgggtcgtctttggcgaagctcatctggccaaccgccgtaggcacatccaaaccaaggttctcgataaacccggctgccatgacaaaactgtccaacaggggcgccgaagcgagctcgcctttaaccttgtaatcaaagcctggcccggccgtagcatcgccgcccaggctgctcaaaaggcgcttggaagattcgtaattatccagccatatcagcggcttattgcagaaagcttgaaacaacgtgcgcttcaccgcccattctgcacgcaccgagagtttcgaattcggccgactgatctgcgggttttcgcgcccatcgaaccccagtaccacccaggcatcgagctccgggatatagccgtggcaatgaaattgcgcgccgttgatttcaaagacctgacggctgggctcgatgcctttgatcggccaggcaccggcgcgaaaccacaggtcttcgatcacatcacagagttcttcatcacgcttggcggccagttcagtcacggccatgcgcttttgcacgtccggatgatcgcgctccagctccttgagctggaggccatggcgtgccaacggcgctatcaactcgcgaaagcgctcatggcggccatacaagcggtgataacaggcgttcatctgttgccgctgggcgtcgctgatacgcaggtcgaaagcgttgctgtcggcgtcgtcaaaaccaccattgaggttctcaaaggcttgcagccgttcaaagcccggcaggctgcgcaccatcggcaggatgcgcgaatgaaaggtgcgcaccaccgcctgagcttctttaatgccaaggggttggccccacaggctgagaatctccatgagtttgttgatgaagtccttgcgcgactcgcgggtgaacgtcaccaccgtcatggaacttagctcaaagcccaggtaatggctgagcagcaggatgcgcagcaccaaggacgtcgacttgccggcgcctgcgcccgcaatcactgaggtcgagggcgtgtcgctgaagatcatcttccattgcgccgcacttggctgcgcgtgggctggcagcaggcgtgcgacatcggccttcatgcgtttcttcagctctgcggtgagcggcaaccgccaatcgtcgaacaggctgtcatctacgcctggcgcacggtactcatcggggcgaaagtcacgaatcaacaggacctggcggccctcttcaatgccatcggccttgccctcgcggtaaccgtattcaacgcccgcctcatgcccactgcgaaagccgtccgcctggccatgcaaccaggaaaaccgatgttgcgcacgcaaacgcgtgaggccatggccgaacaggcgagcggcaagccgcttcaacagcggcatttcagccaaggggcgcagttcgggaggtagatcaggctgttgttgcgacacgcggactcctgcggtgagcttgttttgaccaagccgtcatggtcgccggaaacgccgctcagttccagccaaatgctttgctgtcatgcagttaggcgatgaagtgaaagtgaacaccggggttaaccatcgaataaatgaatcataaacaggcgttttttacgctttttctcgatcatgcgctgctggatgataggcccatcaacaggagacgatcatgcttgaacttcgacctttcaacacactgggcggcgcccaccatggctggcttgacgctcatcaccacttttcctttgccgaataccacgacccccagcgcatgcactggggcaacctgcgggtgtggaacgacgacattatcgcccccggcagcggctttccccagcacccgcaccgcgacatggaaatcatcacctatgtgcgcgaaggggccatcagccatgccgacagcctgggtaacaaaggccgcaccgaagccggcgacgtgcaagtaatgagtgcaggcaccggcattgcccacagcgagtacaacctggaggctacgcccaccaagatctttcagatctggatcattcccaatgaggctggcttgccgccgtcctggggcgccaaaccgtttccacaaggccaccgcgagggctttgtaacgctggccagtggtaaggctggcgacattgaaagcttgcggattcgtgcggatgcacgcttggtggcggcgaacctgaaggccggggaaagcgcggagtaccggttggacagcggtcgccgtgcctacctggtgcccgccacgggcgtgattgaagtcaatggtgtgcaggcaaaggcgcgagacggtgtggcggtggaggatgaagaggtattgcgggtgacggcgattgaagacagcgaaattgtgctggtagacctggcctgatcatgtaggagcgagcttgctcgcgaagaactcaccgacgccgcgttcattcagaagcacgcgttatcgttgacgtttttcgcgagcaagctcgctcctacatacagtgtcagttattggctgattgcaccatcgaccaacacctgcgcctcttccaccagttgcttgaggtgttcttcgccaatgaagctctcggcgtagatcttgtagatgtcctcagtgcccgaaggccgtgcggcaaaccagccgttttcggtcatgactttcaaaccgccaatcgcttggttgttgcccggcgcatggctgaggatctgctggatgctctccccggccaattgcgtggacgtgacctgctccggcgacagtttacccagcagggctttttgcgctggagtggccttggcatccacgcgaatggcgaacggctcacccagggcatcggtcaagccacggtagaactggctcgggtcctggcctttgcgcgaggtcatttctgcggccagcaaggccgggatcaggccgtccttgtcggtgctccacacgctgccgtctttgcgcaggaacgaggcgccggcgctttcttcgccgccaaaccccaacgaaccttcgaacaagccatcggcaaaccacttgaagcccaccggtacttcgtacaggcgacggccgatgcgcgctgcgacgcggtcgatcaggccgctgctgaccacggtcttgcctacggccgcgtcggcacgccagtccggacggttctggaacaggtagtcgatggacaccgccaggtagttgttgggcgccagcaagccaccagagggcgtgacgatgccgtggcggtcgtggtccgggtcacacgcaaacgcaacgtcgaagcgttccttgagcccgatcaggctttgcatggcgtagctggaagacgggtccatgcgaatctggccatcccagtcgacgctcatgaagcggaaggttgcgtcgacctcggtattcaccacctccaggttcaagcggtagtgctcggcaatcgccgaccaatagcgcacccctgctccgcccaatggatccacgcccaagcgcaggtcggcgctacggatcgcgtccatgtcgatcacgttgatcaggtcggccacgtagctgttgaggtagtcatggcgatgggtggtgtctgccttgagcgcctgggcgtgagtgatgcgcttgaccccggccaacttgttggcgagcagttcgttggccttggcttcgatccacttggtgacgtgagtatcggctgggccaccgttaggcgggttgtacttgtagccgccactttgcggcgggttgtgggacggtgtaatcacaatgccgtccgccaggccgctggtacggccacggttgtagcaaatgatggcgtgggaaatcgccggcgtcggcgtgtactcatcgccctcggccagcatcacgtgcacgccgttggccgccaggacttccaaggcactggcaccggctggcgtcgacaatgcatgggtatccaggccgacaaacaatgggcccgtgatgccctgggcttcgcggtacaggcagatggcctggctgatagccagcacatgccactcgttgaaactcagttcgaacgaactgccacggtgcccggaggtaccaaaagccacgcgctgagtggagatcgctgcatcaggctggccggtgtagtaggccgtgaccagtcgcgggatatccaccagcaactgggctggcgccggtttgcccgcaaaaggactgatagtcatgcataaacctcgaaaagaaggattcggaaaaaatgacagtttactgagacttggactactgcgcgacggtatcgatccgacagcctgaagagaaatttcgcataattgaggtgaggatatgcactcggcctgaccggctgtcaggccagctcccacattggatagttgtaggagcgagcttgctcgcgaaaaactcacaagcgccgcgtttattcaggcagcgcgcgttatcgttgacgtttttcgcgagcaagctcgctcctactcagtctgcgcctgccgtagtgactgcgccagcgtatccagggcgatgtcgaggttgggatggccactaaaggtatggctcaagcgcatatgctggtgatgcaaaccactgaggctgaacagctcgcccggggcaatcaccacctgctgggcgagcatgcgctgaaacaccaggcgcatgtccaccggcgccgtcgactgcaaccaaaaactcgccccggccacgggcatgcggtaatgcacacgcccttgcagacgcacatccaagcggtgactcatggcatgggcctgctcgtgaaggcgctgacgcagcgtctgcaggtgctggtcaaaccgcccactctcataaagccgggcaatggcgcgttgtcggatagcagacagtcgaaatgaacgcagcaagaattggcgctgcaattcactgctcatctgccgcgccagcaggtaaccaaagggggcttccgggcccaacaccttttcgaacgaagaaaacacgatcagccgctctgggttgacccggctgcgcaaggccggcccgggcggcgcaaagctcaggtcaccgaaggtatcgttctccagcaaccagcagccgtgctggtcgagcagtcgcgctacgtgcagccgctcgggttcggtcatggtgttacccgagggcatgctgaccacggatgagagcagcacaaggtgcaccggttcatggcgcagcaggtgctccaatgtggccaggtccggacggccgtcggcacgccagggccattcaataacccgtacgccagcggcctgtagcaggcgcaacaccaggtaatcgcagggcgattcaaccaccaccacggtgcctttgaggcccagggcatcaatgaggatgcccagtacgccttgaaggtccgcccccacatacacctcatccgcttgccagcagcgggtgggcgacgaggtatagcgggcggccaaggcagcgcgcaactcccacacaccgcagggttgcgaaggttgcaggtgatggggataccggcgtaccagttggcgttccagcgccagcaaggcgccatccaccgaccccaacagcgccggttcatcaccactgagtaccaccatcgccgggcgccgtgcagccgtgtacaagcgctcgagcaaatcagtaccggccataaggggcgcgtttgcagccacgggccaagcgaagtagccggatttggccaccgagtacactcggccttccttttccagcaacgaataggcgtactgaatcgtcgagatcgacacattcatgcgcgtcgataactgccgcagggacggcagtttcaccggcgtttcccggctgacttcgttgatcaggttgatcatgtagcggtataccgcctgataggcaaagtctacttgccgctccccccgaaggttcatcgttgctcaccggcgttcattggcggacacacgttgctaacgccccgacacttgggcgacgcgcgcctcgggccgcgcgaaagctcgtttgcgcgcccgcgtgccgcgtccttccaacagcgggcgcttacgatacaggtgctgcaacagcggcagcggcaacccactggtatctaccagccactgatgcaggatgtccgctgcgggtttgccctgtagtgccttgtggagttcggggagcgctaccagcatgccgggatggcattgacgcaagaaactctccaaccgctcgccatgctgaacaaagggtgcaaataacaggcaggtcagctggctgtcgtccagacccgagaactcctggatgtaggcggtggacagcaactgcccttctcgcccggacgcttctttgatcagcgcgaccggcacgtgcctgcgatgcaggaagtccgccgcacgccgaacaaaccccgcgacgccatgttcgtaggaaagctcacgcaggcactgggcctgcacgccgtgcaaatgcgccatgagcattgggttgggataggctggatggctgaaatggaactcgaacgggtcccgcttgtgggcgaggaacccggtgagcagtggcgcatgcccgacgtcggcgtctttgagcaagtcggcgatgccgatataggccaaatgacgatgccagccccggcccggactttcgttgcccgcatagtgctcgccatagacgtcgcgatagcaacccacactccactcctccatgcgtgcaaaccatgcattgagcgacgatggcttagcgggcgcaaaggcaaggccggtcgccagcgcgctttttttcagccacgcgatgtattggctttgcttgcgcgctgagtcaccgctgaccaaggcgtgtacgccgccgttccaggtagcgacccgttgatagaaatcgccgagggccaggagcgtgtcatcgcacagggcggcgcggatatcgccggatgtcaggtgcccgatcatcagcttgttacgctggctgatttcccgagcggcattggacgccgggcgctgatggttaaatggcagcacctcatggttttccaccatcaacagctctacgcgggggtcgtcatggaagaacagcgctgcgtagccttgattcagtgagtcgagcgttgcttgagtcatacccgcatgccgcaatgttgccacccgtatctgaaaagtcttgggcgagcgtccggcaatggtcagttgcgccgcacgcagcaacgcgagggtgtagctgctcacttcgccgccaccatgggcgatcagtactttgtaattgcccacttgttccatgccgcctgcggccaccacgattcgctgaacgagcaattgaagtgacgttcgttcggcgcgcgtaaagtgcccgattaaacgttgcagaacttgctggtaaacatagctcatggcttgttcatgaatagtgctcatcgttctactacctgagttgaaatatcagtttcaagcaactaccaaacagcgttgctcgacctattacatctgtaggcttgtcttccattgcgcagcacaagtttgagtcaacattagcaccttgcaacaaaagcgcaggtgagagcattgaaggcgcccatggctgctccgccggagaatccagcgcctgcgcgggctccagcgaaacagctgttagccttaggaatgttccgacaacgtcctacactgttttaactaagcaattagagaattgtccgacgaatattaatcacctgcgcacctgggctgcgcgtaaagcaaaagggtattcgttttgcacttgccgaaaaaaacaatccgagcctcgttagttctgaaggtgcgtgacgcaactgccgtgtaatcaatcatggctcaatccttgagatgacaatgaagactcaattatcggcactcaaataatgattaacagatacagaacagcgtcaaaaagcagttcagatgacctgccagccccacttgaatgacgcccacacaagagcgccgcactggatttcagggcggcgcatggcaataacggtattgtttgcggggtagaacgcccctgcggcggctcaaccccggtgcgggttaagccctgtcaaatggcgcatttgcctcatcagctcaggcgccggagtattcatttgcgaatactcctacagctcaaacagcttcaacctgcaacgccacccgttcgcggcacgggcattcatccatgtatcggtgcgcttcgacgaactgactgaacggaaataccgtggttttcagtgggacaagcacacggtcggccgtcagctggttgatatcgcgcaacgcacgctgcaacgccacttggtcctggataatgcccagctccggcttgccggtgaagttgccgatacagtgcacaaagaactgaatgttcttctggaacgccgcacaggccgggaatggcgtctgattgccaccttgcaggccatacagcaccaggctgccgcgcggcgccaggacgtccccaagcagcgacatctgcgggcctcccaagccatcgaacaccacgtcgacgccacggttgtccgtgaacttgttgatctgcatcagcaggtcttgttcttcggtcacgatgaccttttccgccccgagagacagcaggtattcacgttcagcactgtctttggtggcggcaatcacccgtacacccagggccttgcccagctgcacaaacgaagggccggcacagtggctggcgtcggtcaccagggcaaactggccgggcttgacccgcgccaggtccatgtaggcaaagtacgcaatcagcagcggcgtgtaatgcacgctggcttcaatcgggctcaagacatccgggtaacgggtcagggccgaacggggcaagacgatctgctcgccatacaccgggtaatcattggggctctcggccggaaaactggccaccttatcgcccactgccaaatcatccacgccgtcgccgagggcgactaccacaccggccatttcatggcccaggccagaaggcaggcgtgcatgggaagacgccaggttctggcgccacagaacgtcgtaccaactgatgccgatcgcgtcgacacgcacctgcacttcgcccggtgcgggctgtgcggctgcatgctcttcgcatttgagcacctcggccggaccaaacttgtgaaaacggatcgtgcgggacatcgcaaacctcgtcaaagtaacctctaatgccatgaactttatctgggctttgggggtaagaccaccggtcaccattaatagtcgacatgcctgtcattgattccgcgaaggaggaacacccctcaactatcgtaggaaaaatcaattagccggtgcagagtaccagcctttccccgtaagattcatgccggtcatccttctgaatcgaacctcaggggttgctacgtgaccgctcacatcaagtttgctgactcttccaggacacaagatgaaccgtaacgacctgcgtcgtgtcgaccttaacctcttgatcgtattcgaaaccttgatgcatgagcgcagtgtgacccgtgccgccgagaaattgttcctcggccagccggccatcagcgcagcgttgtcacgcctgcgcgggttgttcgatgaccccctgttcgtgcgcaccgggcgcagcatggaaccctcggcccgcgccgtggaaatcttcgccctgctctccccggccctggactcgatctccaccgccgtcagccgcgccgccgaattcgacccggccaccagcaccgccgtgtttcgcattggcctgtccgacgacgtggaattcgccctgctcccgcaactgctcaaacgcctgcgctccgaagcccccggcatcgtgctggtggtacgccgcgtcaactacatcctgatgcccggcctgctggcctccggcgaaatctccatcggcgtcagctacaccgccgacctgcccgccaacgccaaacgcaaggtactgcgccgcagcctgcccaaactgctgcgcgccgacagcgtgcccggctcgctgagcctggatgacttctgctcgcgcccccacgcccttgtctcctttgccggcgacttgagcgggtttatcgatgaagagctggaaaaactcggccgcaagcgccacgttgtactcgcggtgccgcagttcaatggcctgggtacgttgctggcgggtacggacattttggccaccgtgccggattatgcggcggaagcattgacctcggcgggtgggttgcgggccgaagacccgccgttgccggtgcgctcgtttgagctgcatatggcgtggcggggttcgcaggataatgatccgggggagcggtggttgaggtcgaggattcagatgttttttggggatcctgagagtctctagtggccgtctggcagctgtttatctgatcatttctgccttttcatagaccatgaagacccatccatctccagtggattgctccattggggcacacctgagtgcatgcctcgaatggtttgaaaaggaaagtccatgtcatctgatgaaaaaagccttagccgaggtcgccgccgcccaccggcaaggtcacgccggtgatgtaggaggcctcgtcgcaggccaggaacagaattgcgccagcttgttcgtcgatgctgccgtagcgtttcatcgagctgctctcgagggtctggtcgacgatctgctggtaccacacacgctcttgctcgctctgcgggtggctgttacgcgggatgcgccgtggcggtgcctcggtgccgccgggcgcggtggcgttgacgcgaatcccgctgcctgcagtctccagggccaggcaggccgtcaaggcattcacgccgcccttggctgcgccatagggcacgcgattgaccccgcgtgtggccacggaagacacgttgacgatcgcgcccgcgccctgctccagcatatagggcagcacgcaatggcagcaccacaacgtagggaacagcgagcggcgcacttcggcctcgatttcagcctcggcataatgctcaaaaggcttggcccagatggtcccgccgacgttattgaccagcacgtctatgcgcccgaaacgcgccgtggcggcggccattacccgtgcgcactcgctgtattgttccaggtcggcggtcagcagtagcgctcgctcatgctgcaattcatgcacgagctcggagcgatccaccgcgaccagccaggccccctcctccagcaagcgttcggcgacacgtcggccgatgccttgcgcagcgccggtaaccagcgcgaccttgttgttaaaccgttgagtcatgcggcagtcctcaggcggcatcgcacgtggcgacggcgttaggggtgaatttctcgtaatggaagctggccggggtcacgctttgctgcttgaagtgctcgcgcaccgcatcgaccatcggcggcgggccgcacaggtacacgtcgacatcgccgccattgagggcttcgtcggccatgtgctgggtcacatagccctggcgcgggtgagtggtgtgcggatcagccacgcaggtcaccaggttgaagtcgggcaaacgcgcggtaaaagcctgcaacgcctcaatcatcaccaggtcctgatcccgcgttacgccgtagatcaaccggatcgggcgggtttcctggcgctgcgcgagcacttcaagcatcgacaggaacggcgccaggccggtaccaccggccagtaacagcagcggccgcgccacctcacgcaggtagaaactccccagtgggccggtgatcgccacgctgtcgcccggctgggcgcgctcgagccaaccgctcatcaacccgccgggcacgtgcttgatcaggaagctggcgcgcgggtcgcccgggggactgctgaaggagtaagcacgagtctgcccactgtcgggcacgctgatattcacgtactggccgggcaggaataccggcgcctggtccagttcgaaactcacctccagcgccgcatcggcatgtcgggtgatgccggccagcgtcgcggcaaagtgcgtggtgccggtcttgcaggcgctggacggcaccggcacggcgatcacgcagtcggactgcggcaccatttggcaggtcagcacctggcgcgcctgcgcttcgtcggcgctcagggcgtcgtcgataaagtcgtcgcccaggtcgtaggcgccggtttcacagcggcatttgcaggtgccgcacacgccgtccgagcagtccatgggcaggttgatgcgttggcggaaggccgcatcgagcaccttttctcccaccttgcagtcgatgaagcgggtcactccatcctcgaagttcaaggcgatggcatacgtcatggcggtgtcctcagatatggtagatgtcgatgacctggtggatgtaatcgtttttcagcaccaccttcttgcgcgttatcagcggctgctcggcacggatgtcgaggcgatagaaggaggtaccgaaataactgtcggtggttttgtagcggtggctgagggtgtgccagttgaaacgcaggtccacctgcgcgccgtcgtcggccagcacttcgaggttgcacagcatgtgcacggtgcgcggctcgggcgtgctggcgctggagcgctcagtcttgatgcgaaagatgcggtcttccaggccgtcacggttggggtagtagatcagcgagatttcgcgctgcgggtcttcggtaagagtgtcgtgatcgtcccaggcgggcatccagaactcggccttgggcgaatagcaggccagccattcatcccattggcggtcgtcgagcaggcgcgcttcacggtaaagaaaatccagcaggtggtcccgggcaagactcatggcagcacctcacagtcgctggctatcagcccttgctgttcgcgctcgattgcacgctgcaggctttgggcccagtgcgcatgctggcgcacaaacaagccctcgtcctcggtcttgaccccgctgagctgcggttgcatacccatggccaaggcattttcgtccgcaccctcgacccactgcttggcgccacggctcaagtcattccacagggtgctcgcgccctggtaaccggtctggcaggcgcggaactcctcgaggtcatccggggtgcccatgccgctgacattgaagaagtcttcgtactggcgaatccgcgtggcgcgctcctgggcgctttcgccgatgggcgccatgcaatagattgtcacttcggttttatccacggcgaggggccgcaccacgcggatctgggtcgagaactggtccatcaggtacacattggggtagagacagaggttgcgggtctggtcgacgataaagtcggcgcgcgcttggcccaggcgttcggccaaggcctcgcggtgagcgtgcaccgggcgcacttgggggttaagcaggcgcgtccacagcaggatatgcccgtggtcgaaggcgtagacgccgcccaggcttttcgaccagccattggcgtcgacggtgcgcgtgccttcggcgtcgtagttgcgccggcccatggtcgccgagtagttccagtgcacggagctgacgtggtaaccgtcggcgccgttttcgatttgcagcttccagttgccgtcatagacataggatgagctgccgcgcagcacctccaggcccaaaggggcctggtcgaccatctggtcgatgatgacgcgggtttcgcccaagtaatcgctgagttccggcaccgcatcgctgaggctggcgaacaggaaaccgcggtagttttcaaagcgcgccaggcgcttgaggtcatgggagccgtcgcagtcgaagctgtccgggtaggcgccggtctttgcgtcctttaccttgagcagcttgccggcgttgctgaacgtccagccatggaaggggcaagtgaatgagcccttgttgccttgtttgcgccggcacaacatggcgccgcgatgcgcgcaggcgttgaccaggccatgcagcgcgccgtgcttgtcacgggtgatgaccaccggctggcggccgatccaggtggtgaagtaatcgttgatctgcggcacctggctttcatgggccaggtagatccagccgccttcgaagatgtgtttcatctccagggcaaacaggtcggggtcggtgaagatgtcgcggcggcagcggaacaccccagtggcggggtcttcctgtacggactcgcgcaattggcaggcgagtcggtcgagtgtactgatcatggggcgggccctccgttgttcttgtatcaggcgccctcaccgtacgtgctcgccctgcccgtcaatatccgctgcctgcacatcgctatccgccaggcgcacgtcgcttaacgatggcgtttccaggtctgcgacggcagttcgccgaagcgtttgcgataggcttcggaaaaccgccccaggtgcatgaacccatggtccaaagccacctcggtcacgctgcgcgtgctgcttagttgcaagcgtgcatgtacgcgttcgagcttgcagcggcgtacgtaatcgcgcggcgacagccccacctggcgctcaaacaggctgtacagcgaacgttcactgacgttggccacggccatcaactgctcgacgctgatgtcatcgcccaggtgctgctggataaattcgtgcaccgcttcaaacccaccgccgtgggcagcccgggggggcacccgcgacacattgctgcccagcaatgccagcagcttgttggccacgatgcgttcgtacaggccttgcatgtggggctcggcagcgttttccgcctcatggcagatcaacccgagcaacggcaggaagccgcccatttcactgagcgcgtggcgggccgtcgtgaagcggacccccgcccgcggcaggctccagtgctgctccaggcaggcgttttccagcaggcgcaccggcagtttgatgatgaatttttcgcagtcggcggaataggtcaggtctaccgggtcgtccggattgatcagcaggatttcccccggcccgaacacatcatcctcgccacgggagttggagcggcaatgcccgctcaagaggatctgcaggtggtagatggtctccagcgccaccgacgtgacccgcaccggtgcgccgtagctgatgcggcacaggtccaggctggcgaaggtgcgatggctgatacttgcccggggctggcccctgggaggcaggcgaatgcagtggctgcccacatgctggttgacgtagtccgacaccgcgtaggcatcggcgccctggaaaatctggctgcgctcactcaatagcacggtcatggtcgcgactcttttatcgttattgggctcaggctgacgcttgggtaggggggcgtccaatatggataaagtctggagggataccctggaggtatcgtcgggcgtggcgctcgggacctagcgatacccccgcgcctgaacatcgaacaactcggcatagcgtccacccgccgccatcagttggtgatgactgccctcctccaggattcgcccgccgtccagcacgatgatgtggtcggcattgcgcacgctggagaatcgatgggaaatcaacaacgtcatgcggcccttggcgtgttcgcgaaagtgctcgaacaccgccgcctcggcgccggcgtccagcgccgccgtcggctcgtcaagaatcagcagatccgcctcctggcgcatatatgcgcgtgacaacccaaccttctgccattgcccacccgacaactcctggccgccaagccagcgccctaacggtgtgccgtaggtcttgctcaggcgttcgatgaacccggcggccaccccctgggttgcagccttgcgccaacgcacctcgtcgttcagcgcatcgacgtcacccacgccaaggttctcgccgacggtcatctggtagcggatgtaatcctggaaaatcaccccaatgcgctggcgcagtgtctgttcatcccagtcttgcaagtcgctgccatccagcagaatacgcccctcgtgcggggtatacaggcgcgtgagcagtttgatcaggctggttttgcccgagccattctcgcccaccagggccaggctttgccccggcgccaagtgcaggttgatgtcagtcaatgccggcccctcagcgccggggtaactgaaccccacgtgctcgcaacgcagaccgtcgccgggacgcgcgccctgggtaagccggccactcggcacgaccactggggttagcaggtactcataaaggtctgagagaaacagactgtcgtcatacaggccggcaatcgcgctgaggctggcggtgatcgcgctttgcccctgcttgaacagcacgatgtacatggtcatctgccccaggctggtctggccgcgcacggtgtccagcaccacccaggcgtaagccacataaaacgccgcggtgcccagcaggcccagggcaaagccccaggcatcccggcgcaccgtcaactggcggtcttcggcgtacaagcgtcgggcgttgtcgcggtagcgcttgaggaacagcggcgccaggccgaacagcttgacctctttggcatgggtctcgtgggacagcagcgattccaggtaattctgctgacgggtctccggcgcacgccggtggaacaggcgaaacgcattgcccgagaaatgcgtctcggcgaagaaaaccggtaaggcgccgaccaccagaatcaccagcgcccacggcgaaaagtgcactaacaacacggcaaagctgaccagcgagatcaggttctgcaccaaccccaggcccttggtgaccaggctcagcggccgtgtcgacgcgccctggcgcacgcgcaccagcttgtcgtggaactcggcgtcttcaaattgcgtgagcgagagggtctgggccttctccagaatcatcaggttgaccttcacccccaactgcacccgcagcaacgattgctgcattgacaacgcacgctgagcggcggccagcagccccaacacgcccgcctcggccagcacgtattgcatcactggccacacgggtgcctggctgccggctgcatgaatctgcatcgcatgcaccacgccatcgacaatacgctggccgatccaggcagccagcgcaggcaacagacctgcaacgatggtggccagcagcaggcctatgaataaggggcgcgacgtcccccagaccagcttcagtgccctgcgcgcctggatggaaaacgcgctcaatcgattgaacagcaccatcaatggcatggactccgtgtgggatttaggggtgagacgggtggattatgacaggcgatgacgtcgcgcacatccaacggcgagccgacacgccgcgccagccgggtaataaaaataggtgatcttataaaaccacaagataacaatatctaataattagcttattctaaaaaagactttccccgcagttttttatagagatatcttcacttcacagaccgaccccatgcctggcggaggacgtacccccgacatggatctctctcgatatgcccgatatttctcatcccgccccgctgaaaaaattccacctgtcgctgttgaccggttcgctgctggcggcggtacccgcccaccggccgcgcggcggtgccggaggtgtttcctgacggctactacccgctgaacaacctcaaggaccgcgactacaccaagctggcctacgacttctgattcacatcgccaaacgagggcaccccattgaacacctccaacttgatgagccgtctgctggccccctgcgccctggcgatcagcctggccgcctgctcaccttcgggtgaccaggcgcaagcgaacaaaaccctgaacattgcattttttggcgacaacaccaccctggtcagcgtcgacccattccaggtgtactggctggaacaccgcgttctgctgcgcaatgtcgccgagtcgctcaccgaccaggacccggcaaccggcaagatcatcccctggctggccaagagctgggagatcagtgacgacgcgctgacctacacctttcacttacgcgacaacgtgacgttcagcaacggcgagcgcttcgacgctaacgcggtaaaaaccgcgttcgacagcgacaaggcactggccacccaactgccggcgaccttcggcgccacctacctggcaggttatgaccacgccgaagtggtcgacgacttcaccgtcaagctggtactggctaaacccaacgcgggctttttacaagccacttctaccaccaacttggcaatccttgcgcccgcgtcctatgcactcacggtcaaggaacgctctctgggcaagatcatcggtaccgggccgtttgtgctggccagctataccccggaagtcggcgcgcgcctgacaaaacgcaagggttacgcgtggccctcggcgaatatgaagaacccgggtgaggcacacctggacgccgtcgacatcagctacatccccgaagagagcgtgcgcaacggcctgttcttgcagggcaaggccgacatcctgtggccacgcaacccgttttcggaggtcgacctcaagctgttccagtccaagggcgcgaccatccagagccgctcgctgccgggcccggcgctgaatctgtaccccaacacccgtggcgagcgcatcctcgccgatcaacaagtgcgcctggccgtgcagaagtccatcgaccgcaagagctacgccagcaccgtatataacgccgagttcccagtggtggatggcatctttgacgtgaccacgccttacttcaaaagccagggcagcaagctcggctacgacccggcagctgccgaaaaactgttggatcaagccggctgggccaagggcgcggacggttaccgcagcaaaaacggcaagcgtctgagcctgagctacaacatcagcccggccgaaaccgcgggtgacgtgctgattcaggaccaactgcgcaaggtcggcatcgaactgaagctcagcgtggtgacccgcgccgaatgggtggccaacaactccgcgggcaactacgacctgaccatcaactacatgactcgcgctgacccgatcatcctgcaaaccatcctcgacccgcgtagcgccaacagttccaccgtggccactaacacctacgaaccggccaccctggaaaaagccaagggcttgttcgatgccggcattacggccacccaaggcgcacagcgtgccgccgcctatggcgacctgcaggaccttctgatcgacgaaagctcggcgttcccggtgtacgagcgcgtgtggcaggcggcaacgtcgccgaaggtgaagaactttcgctggactgccgagggcttcgcgctgctgggtgatatcgagatcggcacaccatgagccgctacctgatcgcacgcgtcggccaggccttgctggtgttgtggggggcctatagcatcacctacttgatcctctatctgctgccgggcgacacgctgtcgatcatgctcagtgcttcgggcatggaggccgattcactgtcggtggccgacctggccaaggcgcgggcctattatggcctggacaagggcctgttcgagcaatatgtcgacctgctgctgggcgccttgcacggcgacttcggccagtccctgtcgctgaaccgcccggtatccgagttactcgccgagcgcctgccgcaaaccctgtccttggccggcctggcgattgtgttgtcgttggtcggcggcatcggcctggcctacctgaccgcctacattcgctggcaaccgctgaaaaaagccttggcgcgcctgccttccctggggttttcggtgccggtgttctggatgggcctgttgctgatacaggtgtttgccttcggcctcggctggttccccgccaccggcagccggggctttgaaagcctggtgctgccggcgatcaccctggcgattccaagtgcggcggtgtatgcccaagtgctgcagcgcagcttccagggagtgtggcaggagtcgtatatcgtcaccgcctacgccaagggcctgagccgtggccaggtgcaggcgcgccatgggtttcgcaacgcggcgctgccgattctcaccctgatcggcctgcaggtgggcaacacggtgtccggtgcggtgctggtggaaaccatcttcgcccgctccggcatcggccgcctggcccaggaggctgtgctgcgccaggacatcccggtggtgctggcgattgtcgcggtgtcggcggcagcctttgtgctggtcaacctgctggtggatttgctgtacccgtggctcgacccgcgcatttcccacacgccaaaggtgtcctagaccatgacgatccttgagcaaaacctcggccttacgcccccactctggcaacgccgcacccgccgacaacgtgccacggcggcggtcatgcccttgctgcggcgaccgggctttagcctggcggtgttgattgtgttgttttcactgctcgccgccgtggcgccgcagtggttgaccagcttcgacccttatgccaccgcacctgcggtcaagctcacggcgccgaacctgacccactggttcggcaccgacgagttgggccgcgacctgtacacccggatggtctacggctccagcctgtcggtgctggcggcctttctggcggtggggatcgcgttgttgggcgggctcgggctgggcattctgtccggctttgccggtgggcgtatcgacgcggtaatcatgcggtttgtcgacgtgttgctcgccttgcccggcttgctgctggccctggcgattgtcaccgccatcggcttcggcacggtgccggtggctatcgccgtgggcgtcgggattatccccgggttcgcccgcaccacccgcgccgaagtgctgcgcgtcaagaccctgccgtacgtggaagccgcacgcctgggcggcgccagctggggccgcaccttgctgcggcacatcctgcccaacgcatggggcccagtggcggtactggcgaccctggatttcggtgcagccatcctcgccaccgccggcctgagttttctcggttttggcgccgcgcctccggccgccgaatggggcacgttgatcgccaacggtcggcactttctgatcaccgccccctgggtgtcgttgctgcccggcctgttcctggtcgcggtggtgttcagcctcaaccacattgcccgcacgttcgaggaggttcagcgatgaatgctttagttgatgttcgccagctgagtgtcagctaccggcacggcaacctggcggtaaaccagctgtcaatgaccatcgcccaaggcgagacgctggcgattgtcggcgagtccggctcgggtaaatccaccctggccaacgcgattctcggcctgttgccgggcagcgcaaccatcagcgccggcgagctgtgggtggacggcaacgacctcacccacgccagcgaacgccagagacgcggcctgcgcgggcgcaccatcggcctggcgccccaggacccgatggtcagcctcaacccgaccctgcgcattggccagcagattgccgaagcgctgatcctggccaagggcaagcgctaccccggcgtcgatgcggatatcgtcgagctactgcaacaggtcggtatcgccaagccggtactgcgcgcgcgccagtacccgcatgaactctccgggggcatgcgccagcgtgtgctgatcgccatcgccctggccggcaacccacgcttgatcatcgccgacgaaccgaccagtgccctcgacgtcaccgtgcagcgcaagatcctcgaccacctgaaacggctggtcagtgagcgcggaatttccttgctgatcatcacccatgaccttggcgtggcgctggatcgcgccgaccgcgtcctagtgatgcaacagggacaagtggtggagcaaggggcaccacggcagattctcggcgcgccgcagcatgactacacccgcgccttgatcgccgcggcgccagcgttcgccacgcgccgccagccgctggcccggccggctccgacgcagccgccgatcctgcagctgcaaaacgttggcaagacgttcgcgctgcccaaggtcaagggcgaagacgcgacctttgtcgcgctggaggacctcagcctgcaggtctaccccgggcagaccctggcgattgtcggcgagtccggctcaggcaaaagcaccgcgctgcgcatcgccctcggcctggaaaaacccagccgcgggcgggtgtggttcgagcaacaggacgtcaccgacctcagctggcgcgacttccgcccgctgcgccagcgcctgcaactggtgcaacaaaacccgtttgcggcgctggacccacgcttcacagtgttcgacagcatcgtcgaaccgctggtgtcgttcggcttgctcaagggccctgccctggaacaggccgcgcgcgagctgatcagtcgcgtgcatttgccggtgagtttcctcgatcgcctgccgcgcgagctttccggcggccagtgccaacgggtcgccatcgcccgcgccctggcgctgaaaccggatctattgctactggatgaaccggtcagtgccctcgacgtgtccgtgcaggcgcacatccttgaactgctgcaagagctgcaacgggacatgggcatcgcctacgtgctggtgtcccacgacttgtcggtggtcgccaacttcgcccatgaggtgctggtgttgcgcaatggccgggtggtcgaacagggttcggtggagcgcatcttcaaccgcccgaccagcgattacacccgtgagctgattggcgccatccctggccagcacgctatcgcgagcgccgcctgagcggcgcttcactcggcagtgctgtcacgcgccgtgatgcccttatcctgagcatacgcggtctgacgtgaagcaataggacagccgcacgttcttcgtttcgcccgcggcattgaccgcgtcgaacacttcccggacagccagccgccgagtctgcagcttgagaaaacccgtcagccagatttgctgataacgtttcatttggtcttcagtcagcggtgaaagctggctccgcgcttatcgcttatatcgttccgactgataatgtgagtggcgaggactcttcgcagcacagaaccgatacgaacgcctgtgacactgcgcgctcaagcctgcgcgttacacctcctgccggacctgatccgcttcagaatccagcgcaaccactgtcgcaccatggttggtaatgccgaaaggaatgtgcacagatggcgcaactgcgctagtcgattgtaggtgcccagattgatcatcaaagaagatgtgcggtttcaatacacctaaaatcctgcctttctcgatgccacccagaaagaatgcgtcgttagccatgacaccccaacttttgagtgtattcattgcacgctcatgagacggcgcattgcgggctgtgacgattgagactcgtatgcggttttcgtagtcaggattgagctttttatgttgctcctcgaccgactggattttggatatccgcaccatgaactccttcagcgggcccgggttatggggctgcataacgttcttcacttcatgcgcatggaactcagacaatccagaggcctgcatgattgtttcggactcatcaccggcaaggacgccgtcaaagtcgaacgcgatgcgtagggttttatccgtttcgtcgtcttcgaattttgaatcgagcacctggccagccgggtacccggccttgatagccgcttccacgtcttttttgtcacccgacaaaaataaagcgatattcagagcaggtatgtattcataaggggattttccctgcatgaaaatcgcccgtgtcatcccaaggccgtagtgctcgatagtcttcagcacgcgcagcccagtatcaggatcgttgcgcgaaagcagtatgacctcaacgagcggatccgtaggatcgacgctcaggtcattcactgacagcaagcgcttgatgaaggggaacgctatccccttaggaagcgggacgtgaagatttttttgctgaaacttgcggtattcctcctccccctgtctctgaaacactgcgtccgatgccagcaaatcaaacacagcgctggaagcgacgccgatcaccaagcgattttctaactcgtagggcattgaaacctctctggatgcctctaaacgcaaatatggataggcattgaacatgccgatcgatttcaagcacacatcgcgccttctcccacgcacagtcaggcatatcaatcttcaaatcaatctgcaggttgctttattacgggtggatgcagaaggtttacgtttagtggagcagcgcgtcgccgaagacaccgccaaaattggggcactgcgcaccgggccttcgcagcgatcacctcgtctattcacgccagcaggccaaacaaaccaaggaacggtcaaaaacccacgccatatcgtgttctatcgtggggcaaacgacgacgtgatcgaggtcgtcagactccttcatgacgccatggaagcgcagttgcactaccccgccaatttcaatcgcggcgcaaaagcgtattcggtgccacgccaaacgccttgcgaaacgcatggctgaaatgagaaaagtcagaaaatccgaagtccagcgccgcctcagacaccgagcgcacctggccccgctcgatcgcttctcggctggcattcaggcgctctttccagatctctgcaacgggggttttttggtagcgggcgaaggcccgcgtaacggtgcgggtggacacgttgtgggctttggcgatggcttcaatcgacaggtccggctcggtcaggtggcgttggatgtactgcatgatgcggccgtagaggtccatttcctgatggctggttttcaggtcctgcaattccaggctgatcacaagcagatcaagcacagcacttgagtaacgattggagatgcgctcatcctgcagcgacgcaggcgtgctcgcggcctggtgcagcatttcgcgcaagggcacgacacctgggcgccggtcgtcgaggaccatcgcggtgtactcggcaatacgcggcaggcgctcggtgagcaacgctctgggaatacggatcaagtggttttcggtaccacccaggctaaagcgaaacgcctgggttgcgtcataaagaaacaaattgcccgtggccaggttggcttttcttgagccttgctcgatttgcccatggccctttcgagcgaaacccaaccataaatcttcagccgggccgctgcgcaggtgctgttcggaacgctcccagtaatgcagcggcgaagacagcgtacaaatgtccagcgcgccgactgtattaagggtgagcgagccatcaaagcggctctgggacaagggtttgctatcggctgccaggcaatggcgacagaccacctctttccaataatcaaaccgacgtgttgcagggacggcaagggtcgaatactgagtgttcgggttcatgacgctgacctcgacaacgatgcaataggcgcgcgagaagttgtaacgagcggccgattgtcagccattgaagcaattaacacgccaaatgcagtggcaggccggctgtagcaacggtaactacgatgcgaagcgagccgctcttgatcttgatctgcttttgatctcaagcgccccgttaaaccacgctggcggattacgggcacaccgagcctaagcgaggtgccgagtggtggggcaagagcnnnnnnnnnnnnnnnnnnnnnnnnnnnnnnnnnnnnnnnngcctaatttccacctcacagcagctcataccccgctgatgaggtacgccatgcatcgacattcttcaccacgattggctgattgttcatggcttctgcaacggcgcgacctcgcgcctgaggagtcggcttattggttgattgaatggggaaccatgcagctgctgcaccgacggcaggtcgccaagcgcaccctgccgccgacgcgctgacgcccccccgtaggcctgaaccaaaataacgaggagctcaagatggaatctgcaatcgacacacatctcaaatgcccacgcaccctgtcccgccgcgtgcccgaggagtatcaaccgccgttcccgatgtgggtggcgcgcgctgacgagcagctgcaacaagtggtgatggcttatctgggcgtgcagtatcaaggcgatgcccagcgcaaggctgcattgcaggcgatgcgtcacatcgtcggcagtttcagccaggtcgacggcccgcagaactacgatttgactcagcacactgacagcagcggctttgataatctgatcgtggtcgggtactggaaagaccctgccgcccattgccgctggttgcgttcaccccaggtgaatgactggtggagttcgccggatcgcctgggtgaaggcctgggttacttccgcgaaatcaccgcgccgcgcgccgagcagttcgagacgctgtacgccttccaggagaacctgccgggtgttggcgcagtcatggatgccaccagtggcgagatcgaagaacacggctactggggctcgatgcgcgaccgtttccccatctcccagaccgactggatgaagcccacgagcgagctgcaagtggtcgcgggcgacccagccaagggcggacgcgtggtggtgctggggcacgacaacctcacactgattcgttccggccaggactgggcggatgccgaggcattggaacgctcgctctatctcgacgaaattttaccgacgttgcaggacggcatggacttcctgcgtgacaacggccagccgttgggctgctacagcaacaggttcgtgcgcaatatcgacctggacggcaacgttctcgacctgagctacaacatcggtcactggcgctcagtggagaaactcgaacgctgggccgaatcccacccgacccacctgcgtattttcgtgacgttctttcgcgtggccgcgggcttgaagaagttgaggctgtaccacgaggtgtccgtatccgacgccaaaagccaggtcttcgagtacatcaactgtcacccgcaaaccggcatgttgcgcgacgccctgccgcccacagcctgagcgccctaggcgtttaacccccccagcttctgccgccttgccacctttcacaggtggcccggtcccctgtgcgaggaataaacgatgaataagatccgcctgctgaccctctccaccctgttgcccgccctccacgcgaacgcgggtgaagtcgcgcctggcgactacgagcaatatccgatcggcgccactatcggggcgatttattaccagcacgccactacggactcggcttacgccaacggccacaaggccagctctgacttcagggtgacctcggacgtgggcatcctgcgtctgctccatgtgtatgccctcagcgacacggtcaccatcgacccgcaattccttttgcctttcggccacgtctccggcgcaggtgacgcctcagcactgggcagtactcgcggcgtgggcgacttgatcctcaccgcgccggtgaaatggcggttcaacgaagcccgcgacaccctcagtatcgccccctatgtgtatgtgccttcgggcacgtatgacaaggacgatgcgctcaatctcggggagaatcgctggaaattcgaactgcagagtgcctacgtcaagcacttcacagagaaatgggcgatggacctggtcggcggcgcgacctggtatggcgacaacaccgattacggtgcaaatgccgaccgcctgaagcaggacgtgtcctacgcagcgcagatcatgggccgttacatgccggacgccaccaccacctttgctatcggcttggggcgtacctggggaggcgagacaaacatcgagcatgtcaatcaagacaacgagttgggcaccaccaacgtgcgtctcaccgccaccaaattcgtcacccccaccgaccaggtgcaactgcaattgggcaaagacctctcggtggacaacggcacccgcgaagacttccgcatgaacctgcgttacgcgcacattttttaacgccagaaactgcgaccgcgcgcccctggcgccaaggtgtcccgctcagccaagtcgatgtctttctcaaccaagccaccgcctggatgcgcggactatcttgagccccaggcccgctgatagtgagcatgcagtgctcttcggccatttacgataaggacagccaaccatggcaatcgctcgccccacccttgaacagctattggctatttcgagcagcctgcacatgcaactcagtgcgcagcaagccgatgaatacctggcacttatgcaggcaagcttcgacgcctatgacctggttgacgagctgccggacttcatcccgccggtgcgttatgaacgcagctcaggctaccgtccctcggccgcacacaacccgctcaacgcctggtacttccgcaccgaagtcaacggtgcgcgcgaaggcaagctcgcaggtaaaacggtcgccctcaaagacaatatttcactggctggcgtgcccatgatgaatggtgccaagccgcttgaaggcttcgtccccgccttcgatgccacggttgtcacccgcttgctggatgccggcgcgactattctcggcaaggcaacgtgcgaacactactgcctgtccggcggcagccacacttccgatcctgcaccggtgcacaacccctatcgccaagggtttgcctcgggtggttcgtcttccggcagcgcagcgctggttgccgccggcgaggtcgacctggctgtcggcggtgaccagggcgggtcaatccgcatcccttccgccttctgcggcacttacggcatgaagccgacccacggcctggtgccctacaccggcatcatggccatcgaggcgactatcgatcacgccggccccatcaccgcaaacgtacgcgacaacgccttgatgctggaggtcatggccggcgccgatgggcttgatccgcgacaagccgcgccgcaggtcgacgcttacagcgattacctggagcgcggtgtcagcgggctgaggatcggcatcctgcgcgaaggttttgaactggccaaccaagacccgcgtgtggactcgtgcgtacgccaagccattgcagcgtttgcgcggctgggcgcgcaggtcgaggaggtgtcggtgcctgagcacagcattgccggttcgctgtggcaccccatcggctgtgaaggtttgatgatgcagatgatgcacggcaatggggccggttttaactggcaagggctgtatgacctcggtttgctggaccagcaagccgggtggcgcgatcaggccaatgagctgtccgcctctctcaagctgtgcatgttcgtcgggcaatacggtctggagcgctacaacgggcggttctacgccaaggcacaaaacctcaggcgcgtggcacgcgccgggtatgacgccgcgttggcgcgctatgacctgctggtgatgcccaccgtgccgatcgtcgcccagccccacccgcagccgggttgctcggttaccgagtacgtggcccgtgcgctggaaatgatcggcaatgcctgcgcccaggacatcaccggccatccggccatgtcgattccctgcggcctggtagacggtctacctgtcgggctgatgctggtcggcaagcactatgccgaaggcacgatttaccaggctgccgcagcgttcgaggcgtcggttgactggaaaaactgttagccggtagtcccgcgcagcgcaaaaagaataagccgccaggcgctgcccagaagctcaacgatgaggagtcaacttatgagcgcacacgaagcaagcacatctacaccgggcgaacgcgcgcaagcgttactgcaagtgctcaagcagaaggatctgatccccgacggttacatcgaacacatgacacagctgatggcacaccaatggagcccggagaacggggctcgggtggtggccaaggcctgggtagacccgcagtttcgcgaactgctgctcaaagacggcaccgcggcgtgcgcccaatttggctataccggcccgcagggtgaatacattgttgcgctgccagacacgcccagcgtgaaaaacgtgattgtgtgcagcctgtgctcctgcaccaactggcctgtcctgggcttgccgccggagtggtacaagggcttcgagttccgcgcccgactggtgcgcgaagggcgcaccgtgctgcgggaactgggcaccgagctgccggccgacgtcatcgtcaaggtctgggacaccagcgccgaaacccgctatctggtgctgcctgtacggcccaagggcagcgaatcgatggatgaagaggccctgcgaaaactgatcaccaaggatgtccttatcggcgtggcgctgccttaggtggcgtaaccggtgccctttgttttttgcacttttcagaggtattcacaatggatggctttcacgatctcggtgggtttcaaggctttggcaaagtccctcacaccatcaacagcctgagctaccaacccgtgttcaagcaggactgggagcacctggcctacagcctgatgtttgtcggcgccgatcacttgaaaaagttcagcgtggacgaagtgcgccacgccgtcgagcgcctggatgtgcgccaacatgtcggtacccaatactacgaacgctatgtcatcgccaccgccaccctgctggtcgaaaccggagtgatcacccaggcggaactcgaccaggccctgggttcgcacttcaagctggcgaaccccgcgcatgccagcgggcgcccggcgatcagcggccgcccgccctttgaagtgggcgaccgggtggtggtgcgcaacgagtatgtggcggggcatacccgcatgccggcctacgtacgcggcaaagaaggcgtggtggtgcaccgcaccgcgcaaaagtggcccttccctgacgcgatcggccacggtgatctgagcgcggcgcatcagccgacctatcacgtcgagtttcgcgtgaaagatctctggggcgacgcagcagatgatggcttcgtggtggtcgacctgttcgaaagctacctggaccacgccgatggcacggtgaacgcatgatggacggcgccctgacaggccgactgccggtgacggtgctttccggcttcctcggcgccggcaaaaccaccctgctcaaccatatcctgcgcaatcgcgacggcctgcgcgtggcggtcatcgtcaatgatatgagcgagatcaacatcgatgccgagcaggtgcagcgcgacgtggcgctgcaccggggccgcgatgagttgatcgagatgagcaatggctgcatctgctgcacgctgcgcgccgacttgctcgagcagatcagcgccctggcacgccagcaacgtttcgactacttgctgattgagtccacggggatctccgagccgatgccggtagccgagacgttcgccttcctcgacgcgcagggcttcagcctcagcgaactggcgcggcttgacaccttggtgacggtggtcgatggcagtcgctttgaagcattgctcgaatcgccgggcatcgtggcccgcgacgacgcacccacgcgccatctgaccgacctgctgatcgagcaagtggaatacgccaacgtcattctcgtcaacaaactggacctgatcgacgagcccggctaccaggccgtgcacgcgatcctcgccggccttaacccgagcgcgcggatcatgccgatggctcagggtaacgtggagttatccgcaatactcggtacccacctgtttgatttacctagcctcgcggcctcgcccggctggatgaaaaaaatgcaggccgacgacacgccggcctctgagtcggacacctatggcgtgacctcctgggtgtaccgcgagcgtgccccgtttcacccgcagcgattgctcgattttctccagcagccctggcacaacgggcgcctgttgcgcagcaaaggttacttctggctcgccagcaggcacttggaaaccggcctgctggtgcaaagcggcaggcagttccagtgggactacgtcgggcactggtggaacttcatcgagcagtcgcaatggccgcaggatgaatatcggttgcagagcatcatggccaagtgggacagcattgtcggcgattgccggcaggagctggtctttatcggccagggcctggacacccaagcgctgcagcgcgcactcgacaactgcctgctgagtactcaggaaatcgccgccggcccctcggcctggcaagccctgccgggggcagcaatctttgactctcaggccttatcggcgccgacgccgtccttgcaggctgaccctatttgaccgaggtagaggtgccccatgctctttttcaaccgaaccacccgctgcgtattggcgccgctcgccgaccgactggagcagcctgaccagccaggcacaccgctgtcgtcaagccacccgttgttacgccgcatcctggcaagcgtcgaacaactgctgcaagaacggcgaaccctcaaagagcagtcccgcgcgctgacgttggaaatccgccagttggaggagcgcctggcccgccgtgaccagctggtgcggcagtgggaggcgcgctggaccctgatcacacagggtgcaggtgaacggttctgggagctggaactggatggcgccgccgcccccgcaccgggtgctgcgatgacgtggacggggtctgcgtcgaacctggcccaggcgattgaccagtttggcggctggagcgaacaactgcatccggatgaccagccagcgcatcggaaggcgctcgcccggcaccttgccgatcgcagcgggcgtacggcctttgcgctcgacgtgcggatgaagtcggcactcggcaatgactatcgctggtgccggatcagcggagccgcccgacgcgatgcgcagggcacagcgcttgccatggggggaaccgtgcgtgacattcatgaacagtacctgcaccacgaggcgctcgaactggcggccacacgtttcgacatttcccgagaaatgctgcacgacgggctctgggatatcgaggtggtggccggcgacccggcgaacccgaacaataccatttggtggtcttcgcagatgcgccggctgctgggctgcaacacggtggaagagttccccaacaccctggaaagctggacctcgcgcttgcatcccgaggatagcgcacgagccatcggcgcgttcgtcgcccatgtggacgaccgcagcggcaagaccccattcgatgtggagtatcgactcaaacacaccaatggcactcaccgttggtttcgcggccgggggcaaacccgccgcgcaccggacggctcgccgcaacgggtggtgggtgccatcaccgatatccatgcccaccatgaagaaagtgcgatgcgcgaggcgcaggcgcaacaacaccaagtgatgcaggaaaccctcaccaagctgacgcagattgtcgccaccattcagggcattgccagccagaccaacctgttggcattgaatgccgccattgaagcggcgcgagctggcgaagccggtcgcgggtttgcggtggtcgccgatgaagtgcgtaagctggccacgcggaccagccacgcgacccagcaagcggcccagatgatggaccactagcgacatccaggcgcccgcgcagcctgcgtgggcacaggtcatattccaacaataataatcaggtacgttatgcgcgattacgactcagcagtctcttccttcgattatctacagctggctgcccaggacttgcacggcgaactcggcgccttgaatgcctgcattgaatgctgcgaccggcacgcccatggcaatgccgtggcgttgtattgcgaaacgcgcgatggccgcgccacgcagtacaccttcagcgaactgcaggcgcacgcggcgcgcttcggcaacttcctgcgagcccatggcgtgcagccgggggatcgggtcgccggcctgatgccacgcacggttgaactggtgatcgccatcctgggaacctggcgcatcggggcggtctaccaaccgctctttaccgcattcggtcccaaggccattgaacagcgactggactgttccaacgcgcgctggatcgtgaccgacgcccacaaccgtcccaagctggacgagctcctcgactgcccccacgtcatcgtgaccgacgccacctcacagcgccccagcgactacgcgttttgggatgtgctggagcatcaacaacccgactgcacacctgagctgctggacgcccgtgcgccgttcctgctgatgtgcacctcgggcaccacagggccggccaagccgctggaggtgcctgtgagcgccatcctagccttcaaaagttatatgcgcgattcaatcgacctgcgcgaagacgaccgtttctggaacctcgccgaccccggctgggcctatggcttgtattacgccgtgaccgggccactggcatgcggccgggccacgctgttccatgacggccctttcaccgtgcaaagcaccagccggattatcgccaagtacgggatcagcaacctggccggctcgcctacggcctttcgcctgctgatagatgccggggccgagttcgccgacgcggtgcgtggccaactgcgtatcgtcagcagcgccggcgaaccgctcaacccgcaagtcatccgttggttcgccgaacagctcggcgtggtcattcacgaccattacggccaaaccgaaatcggcatggtgttatgcaatcaccatgggttacgccatcaggtacgtgagggttctgccggttatgcggtgccggggtaccggattgtcgtgctggacgatgcgcagcgggaattaccgacaggccagccgggcgtactggcggtggatcgcgagcgctcgcccctgtgctggttcaatggctaccttcacatgcccaccaaggcgtttgtgggccgttactacttgagcggcgatatcgtggagctcaatgaggacggcagtatcagctttgtcggccgtaacgacgatgtgatcaccacgtccggctaccgcgtggggcctttcgatgtagagagcgcgctcatcgaacatccggcagtggtcgaaaccgcggtgatcggcaaacccgacccgcaacgtaccgagctgatcaaagcgtttgtcgtgctcaaccgtgagtacctgcccagtgtcgagttggcggaagtcttgcgcctgcatgtccgacagcgcctggctgcgcatgcatacccacgggaaatcgagttcgttgagcaactgcccaagacccccagtggcaagttgcagcggttcattctgcgcaaccaggaaattgccaaacagcaggcactcgacacatgactcacgggcgtatggctcccccgctcagccgctcggagttccagcgcagagccctggagctgttcaaggagcgtagtttcagccaggtcagcatgcgcgaattggccgcgcatgttggcatcagcccgggcgcgatttatcaccatgtagagagcaaggaagccatgctgtttgagtggctgacagagctgtatcaggcgctgttgtcgcacgtcgatcggatcaacacccgtagattgacggccgcgcaacgcctggcaaagctgatcgaaggccatcttcaattgcatgaacagatgaccgggcacttcaagttggcggtcatggacgccaactgcctgggcgccccgatgcaagcgagcgttgagcgattgaggctagcctatgagtcggaactcatgaaggtggtcggccaactgggccatcagcccggcgggccgttgcgcgagggcgcgctcacggcgattctgcccgtgctgaacagcctgcccacatggctgagcccaaagattgatcaccgtcagcgtcggcttattacaaagaccatcgccgatgcggtcataaaggccattaattccctaccttgagtgactacacccaacggtaaccacgacgcgaagcgagccgctcttgatctgcttttgatcttgatcttaagcgccccgttaaaccacgctggcggattacgggcacaccgagcccaagcgaggtgccgagtagtagggcaagagccttttgcttacttttgggctcttttcaaaagtgagccgctgtcagagcggaaccctaagtggccgttaccgcaggaatggatatgtactcagtgtaacggtgtcgactgtgaggccgtcttcgcaggcaagccagctcccacagttggatcgttagggtgtcaggtaggtgtcggctgtcaggccgtcgcgggagcaagctccctcgccacaggctcggcgtcatgccgaagttgtgtagatacctatgcatatagcggtttttcgaattttgaacaccagagccccgccaaaaatgtttctgacgacgcgaataacctctagcaggcgttgctccgactgttcagcctgacgcctctcgccccgctcgtccctgaactagccgagctacgttctcatcaatgcggccctgaatcaggcgcaaggtgtctcgcgtaatatcctgagggtataagttctcagcgatcgccgaaaaccggcgcgccacctcgcaaatgccatcaatcatgctgccagccaagtccggtggcacctcggcctcctcggcgagtcgaagcagttgtgtgcgggaaatcgacagggcttctcccatcacatccatctggtgataaccacctggcccctcgcagaaggtcacgtcgtaagccggcgataatctccactgaccgccttgcgacatgatgtaggcaaagttcttggggtgatcgtctctgttgttgaacgccacattgaagacggcacgttcgaaggcccgcgccatctcgcgcacgtcatttgtacacatctgcgttgcccgcaggaagttgacgtagtccagcactcccggggagcggtaattggcgcccgtaaacgccgcgaggctttgcatcgggacgcgcagaccatcgcgtcggtcaaatcgcttactggcaaacgctgccaacccatcaggcagactgaagtactgcgtgtcgggggtgtctataccgcacaagcgcaggcattcggcgtagaccatttcgatggcacatacctcggcatgctcttctttggcagggaacttgatcaaccacgcttcaaagcctggcgtgacggcggtggtaaaaccaccggttacggggtcgcgatacacgagggccttgggccgtgctccttgaggcgagccacccaccagcagcaacgtgtgcaggaactcgcccccgtctccgtggagtacttgctgcacctgggcggcaagctgttccagcgggatgtgggcttcagacgcctgcccttcgggcgccacgggctcaaacgtcacggcgcccatcgcgttgctaccgatgtacgccagccgctccagtggtccgatgcgcgccgtggtgagcccgcggcgcctgaacatgcggtccatcaacaacatgccccagccatccggcaacgcatcgtagataggccctggcaaatgcagttggtggtctggaaaatctctacgcaactgagccccctccaacggcagcatgtatgagcacagttccaaacccttttgtctggcttcgttactgtactcgaacacgatcagcgggcgaccggtcaaggcggtggtggagaccagcgagccccattgccatcgctcgccccagccttcgtagaagacatttacctgctcaagcattgccgggcttcctctttgtgcgcagacgattggcgctgttttcgtagcgccgaatatcctcgatgctgtctagcttaggcagaaacaggccttcgagctccttggttcggccaagcgctatggccacccgaacgacgttctcgaaccccacatttcgcccggcttcaaggttggacacggtgttggtgccaatgccagcgcgcccggccagttcggcttgtgtcatgtccagcgccaagcgctctgtgcgcaagcgatcacagaggcgcttgacgacttcgctcggcttgctgaagcttaaatccaacataacctgtacttatcccttgttgcgccagttagtgcccaaaattatagaattagcagcaacgcctatcaagccgataactccctgagttagggccttagtcaccaaaatgtacgtcttagccacaacatactggatttatctgacattaagtcagacgacgctgccgacggcggtttctccgaccaggcgcacctggcccgcatgggcacgtcaggcctacctgcaagtcaccaacggcatgagccaatatcaggcactcaagcaggccttgaactccagccagatcaaccttggcgccgtgacccacggcttcgaagccggctcgcgtatcaacaccgatgtactggatgcccaacagaaagtcaccgatacccagcaacgcctggcccaacaacgttatgcgatcctgatggcccagttgcacctgttggcctccaccggcaacctgagcgacgcgcgcctgcgggatatcagtcatacgctgaactgacgcactggtcagtagtgcgctgacattcgctcaacgtgagggctgatttggattaagcttgggcatctcaaaaatggaacactgcccatgttcgacctcaacgaactcttcctctacgccaaggtggtcgagcacggcggctttgcggcggcgggccgtgcgctgaacctgcccaaatcgaccttgagccgcagagtcagccagcttgaagccaggctgggggcacgactgatacagcgctcgacgcgccagttccaagtcaccgatatcggccaggcctactaccgccactgcgtggcgatgattgccgaggccgagtcggccgaagatgtgattgctttcaacaaatcagagccgcgcggcgtgatccgcttgagctgcaccactgcgctgctcaactattgggtggcgccgatgctggcccaattcatggcgcaatgcgccagcgtcgaactgaacgtgaagagtttcaaccgcaaggtcgacatcatcagcgaaggctatgacatggccttgaacctgtgtttcccgccgctggaaagcagtgagctggtcatgaaggtattggctaaaagtcctcaggtgctggtggcgagcgcgacttttttgcagggtgctcccctgccctcgctaccagctgaccttgccgggctggcgactatccattggggcaacccgttgcttcagtacctgtgggacctgaccgggccggacggcgccacggcgcaggtagtacacacgccacgcctggtcagtgatgacatgtccaccctgaaaaacgcagcactggcgggcgtgggcatcgccaacctaccgcaggtcgtcgtgaaagacgaactggccgatggccgcctgattgccgtattgcctgaatggcaacccgctgaaggcgtgatcaccgccgtgttcccttccaggcgtgggctgatgccgtcggtgcggtccttgatcgactttctgggcgaggcgtttgaggcgccgtgatgcgccctcgcgttgctgggaaagttccttgcaccctgagcaacagtcttttgtcatcaatcacattgatagctccctaacaaaacccccatgctagagggctgactccgcgcttatatcattccgaatgatagttacctttgcttcattcgattcgtgacctagcacctccccgcgcatgatccgcccatctcaaatacattggcggatgcacctcatggaacagtcacttaaacatttgcgcttccccttggcgatcttggccgtggtggtgatgagcgcgtgcggcaagtccccggaacaagcggccgccatgcctcctgccaaggtcagcgtggccaaggtgttagaacaaccggtcaacgaatgggacgagttcaccgggcgccttgaagcgccggaaaccgtgcagattcgtccgcgagtgtccggccagattgaccaggtggcgttcaccgaaggcgcgctggtaaagaaaggcgacctgctgttccagatcgaccctcgcccgttccaggccgaagtgcgccgcctcgaagcccagcttgcacaaacgaaagccgccgccacccgcagtgaaaacgaagcgcaacgtggcgagcgcctgcgccagagcaatgcgatctccgccgaactggctgactcgcgcaccaccgccgcccaggaagcccgcgcggccatggccgggatccaggcgcagttggacctggccaagctgaacctgagcttcacccgcgtgacctcgcccatcagtggccgcgtcagccgtgccgaaatcaccgccggcaacctggtgaccgccgataccactgcactcaccagcgtggtctccaccgataaggtctacgcctacttcgacgccgatgagcgcgtgttcctcaagtacaccgaactggcccgcgaaggccggcgtggcgcaaccacccctgtgtacctggggctgtccaacgaaaccggcaacccgcacctgggccagatgaacttcgtcgacaaccaggtcaacccggccactggcaccatccgtggccgtgcggtgttcgacaacagcaagggcgaatacacccctggcctgtatgcgcgcttgaagctggtcggcagcggcacctattcggccgtgttgatcaatgacgaagcggtcggcaccgacctgggcaagaaattcgtactggtgatggacggcgacaagccggcttatcgcgcggtggaactggggccgaaaatcgaaggtttacgcatcgtgcgcagtgggctgaccaaggacgacaccgtgatcgtcaagggcctgcaacgtgtgcgcccaggctcgccggtcgcgccggaaaccatcccgatggccagcaaggaaaccctcgccgccttggcccaacaacgacaagcgcttgaagccagcaacctggagcaaatggcgccggaaaaacccgcgcccaagctcgcaagcgtcgcgactccacgcggttaagggatactcaagatgaatttttccaagttcttcatatcaaggccgatcttcgcagcggtgctgtcgctgttgatcctgatcgccggtgcgatctcgctgttccagttgccgatcagcgaatacccggaagtggtgccgccgaccgtggtggtgcgcgccaacttcccgggggccaaccccaaagtcatcggtgaaaccgtggccgcgccgttggagcaagccatcactggcgtcgagaacatgctctacatgtcctcgcagtccaccgccgacggcaagctgaccctgaccatcaccttcgctctgggcaccgacctggacaacgcgcaggtgcaggtgcaaaaccgtgtgacgcgcacccagcccaagctgccagaggaagtgacgcgcatcggtattaccgtggacaaggcctcccccgacctgaccatggtggtgcacttgacctccccggatcagcgttacgacatgctgtacctgtccaactacgcgatcctcaatattaaggatgaactggcccgcctgggcggcgtcggtgacgtgcagttgttcggcatgggcgactactctctgcgcgtctggctcgacccgaacaaaaccgcttcgcgcaacctgaccgccaccgatgtggtcacagcgatccgcgagcagaaccgccaggtggctgccggtgccctgggcgcccagcccgcgccgagcgacaccagcttccagttgtcggtcaatacccagggccgcctggtcactgaagaagagttcgagaacatcgtgattcgcgcgggtgccaacggtgaaatcacgcgcctcaaggacatcgccagggtcgagctgggctccagccaatacgcgctgcgctcgctgatcgataaccagcccgccgtcgcgattccgattttccagcgtcccggctccaatgccatcgacatctccaacgatgtgcgcagcaagatggccgagctgaaaaagagctttccggcggggatggattatcgcattgcctatgacccgaccatcttcgtacgcggttccatcgaagcggtggtgcataccctgtttgaagcactgatcctcgtggtgctggtggtgatcctgttcctgcagacgtggcgcgcctcgatcatccccttggtggcggtgccggtatcgttgatcggtacgtttgcggtgatgcacctgttcgggttctcactcaacgccctgtcactgtttggcctggtactggccatcggtatcgtggtggacgacgccatcgtggtggtggagaacgtcgagcgtaatatcgagctgggtctggagcccttcccggcgaccgaaaaagccatgagtgaagtgaccggccccatcatcgccacggcgctggtgctgtgtgcggtgttcattccggccgcctttatcagtggcttgaccgggcagttctacaagcagttcgccttgaccatcgcgatctcaaccgtgatctcggcgttcaactccctgaccctgtctcctgcactggccgctgtgttgctgcgcggtcacgacgcgccgaaggatcggttctcgaagttcctcgacaaggtcttcggcggctggctgttccgtcccttcaaccgctttttcgaaaaggccagccatggctacgtaggcaccgtgcgccgagtgattcgcggcagcggtattgcgttgttcgtctacgcaggtttgatggtgctgacgttcttcgggtttgcccacacgccgaccggtttcgtaccggcccaggacaagcagtacctggtggccttcgcccaattgcccgacgccgcaagcctggaccgcaccgaaaacgtgatgaagcgcatgtcggagatcgccctgaaacaacccggcgtggaagctgcaattgccttccccggcctgtcgatcaacgggttcacaaacagcccgaacagcggcatcgtgttcgtgaccttgaagcccttcgatgagcgtaaagacccaagcatgtctgccggtgcgattgccggtgcactgaacggccaatacgccaatatcgaagaagcctacatggcgatcttcccgccgccgccggtacaaggcctgggcaccatcgggggcttccgtctgcaaatcgaagaccgtggcaacctcggctatgacgagctgtataaagaagtgcagaacgtgattaccaagagccacagcgtgcctgaactgttcggcctgttcaccagctacacggtcaacgtgccgcaagtggacgcggctatcgaccgcgaaaaggccaagacccacggcgtggcgatcagtgacatcttcgacaccctgcaggtctacctgggctcgttgtatgccaacgacttcaaccgcttcgggcgcacctatcaggtcaacgtgcaggctgagcaacagttccgccaggactccgaccagatcggccagctgaaagtgcgcaataacagaggcgagatgatccccctggcgacctttatcaaggtcagcgacacctcgggcccggaccgcgtgatgcactacaacggcttcatcaccgcagaaatcaacggcaacgccgcgccgggctacagctccggccaggcccaggccgcgattgaaaaactgctcaaagatgaactgcccaacggcatgacctacgagtggaccgacctgacctatcagcaaatcctctcaggcaataccgcgctgttcgtgttcccgctctgcgtactgctggcgttcctggtgctcgcggcccaatacgaaagctggagcctgccactggcggtgatcctgatcgtaccgatgacgctgctgtcggccattaccggggtgatcatctcgggcggcgacaacaatatcttcacccagatcggcctgatcgtactggtgggcctggcgtgcaagaacgcgatcctgatcgtcgagttcgccaaggataaacagcaggaaggcctcgacccgctcgctgcggtactggaagcctgccgcctgcgtctgcggccgatcctgatgacctcattcgcgttcatcatgggtgtggtgccgttggtgctctccagcggtgccggtgccgagatgcgccatgccatgggcgtggcggtgttctccgggatgatcggtgtgaccttcttcggtctgttgctgacgccagtgttctacgtactgatccgtcgctatgtcgagcgcagtgaagcgcgcaaagcggccaaggccttgaagctggagacacagcaatgagtgtgaaaatattcctgccgagcctgctggtactggcgctcgccgcctgtgccgtaggcccggactacaagacccagcaactggaggcggccaacatcacggccgccgccgacaccaaaagctacgaccacgccaaatacgaaggcatctggtggcagcagtttgacgacccgaccctcaaccagttggtgacccagtccctgagcggcaaccgtgatttgcgcgtggccttcgcccgtctgcgggcggcacgggccatccgtgatgatgcggccaacgatatcatgccggtggtcacctcccgggccagcagcgatgtgggcaagggccagattccagggcagaccaccaagcgtgtcaacagcgagcgctacgacctgggcctggacatggcctgggaagtggatttgttcgggcgtatccgtcgcaacctggaagccagcgacgccgaccaacaagtcgccgaagccgacctgtaccaactgcaagtcaccatgattgccgaactggtggatgcttacggtcaactgcgtggagcgcaactgcgtgaacgcatcgccctggacaacctgaagaaccagcaggaatcgcgcaccatcaccgtcagcctgcgcgacgccggcgtgggtgatcagctcgacgtcgaacgcgccgacgcccgcctggcagcggttgaagccagcgtgccgcaactgcaggccgaacaagtgcgcgagcgcaaccgcatcgccaccctcctcggccagcgccccgacaagctgagcgtggacctgagcccgaaagacctgccagcgattgccaaggcgttgccgattggcgacccggggcaactgctgcaacggcgcccggacatcctcagcgccgaacgcaaactggccgccgccaccgcacgtatcggcgtggccaaggccgacctgttcccacgggtgagcctcagcggcttcctcggcttcactgccgggcgcggttcgcagatcggctcggccgcggcgaatgcctggtccctgggcccgagcatcacctgggccgcgtttgacctgggcagcgtgcgtgcgcgtttgcgcggtgcgaatgccgaagccgatggcgcgctggcgacctatgaacagcaagtgctgctggccctggaagagtccgagaacgccttcagcgattacggcaagcgccagcaacgcctggtctcgctgatccgccaaagcgaatccagccgcgccgccgccgacctcgccgcgatccgctaccgcgaaggcaccgtggacttcctggtactgctcgacgcccagcgcgaacgcctggccgccgaagattcccaggcccaggccgaagtggatctgtatcgcggcattgtggcgatctacaaggcgttgggtggtggctggcagccggatacggtggtggccagcaaccagtgaggtaaagagctcctttggttggtcgcatccagccaatttttagccctgcggtccattcggtcgtggggcttttttttgccaccgatcgtcccacgcagagcgtgggaacgatcaagtgagaaacatcctaatcccgcagggtggaagttagaggcgactcgtctcgctcaaaatcaaactccgataatgccccggattcgatcccacccacttacgaaacgccttataaaacgaactcgcatcggcaaaccccaaccgcgtggctatctcggcaaagctgatctggggttcggccaaccacacaatcgccagttctttgcgcacgctgtccttgaggccctgataggtctgcccttcttccgccaggcggcggcgtagtgtggacgcagaaatacacaacctggcggcaagcccctcggtttccggccaggtgtcggggggcatctgccgaaggtcgtgcttgatgcgcgtggcgaggctttccgggtcgcggtatttcaccaggatgttagccggtgcatgagcgagaaaacgttggagctcctgcgggctgcgcttgatcggcaggtccaggcagtcggctgaaaagatcatgcgggtgcgtggtcgatcaaagcgcaggttgtcagagaacatcacctgataatcgtcacagaagtccggctgagcgcagcgcagttcaatggcgaggatcggaatacgccgccccgccagccagcaggcgacgccgtggacgatcatccagtaggtgaagtaggtaaacgcacgcttgggttcatgctcaggttcgagcaggacgatctccgccaggctctgttggcgcaccagctgggccggaaggtgctccagcatcagcgagagaaaccccaagccagtttccaggcccgcagccaggctcggttgcgccatggcggcgcgacacaggaacgccaggctgccggacttgagcttgcgcgggtccatgccaaagaactcatcgtccctgcgccgcgccagcaaacgccacaggcgtgcataggcggtggccgccacgcgagcgtcgggctgctcaagcaacgccggggcaatcccgactttgctcaatgcctcaacggtggcggctcccggcgcgcaactgtgcaacaacgcttcgcgcacgaggtggatggagatggtgtctttttccgacatggggcgttgagctgtccggctgcggtgtggttggcctgcatcataagggcggttgcgcttcgccaccactgttcagcccacgttcagcaaaggtcaatatttcttgtttagcaatgagtatcattatgttacaaattagctccctaactagttgcgcctgggtgcccgatgctcgttccttttttaatcatgctgcgcgaaggcattgaagccgccttgatcgttggcatcatcgccagttacctgcaacagaccgggcgtggccagtggatgcctgcggtttggatcggcgtattccttgcggcagcgctggcgctgctggtgggcggcggcctggaattggtcagtgcggaattcccgcaaaagcagcaggaattgtttgaaggtgtcgtcgggttggtggccgtgggcatcctcagttccatggtgttctggatgcgcaaagtggcgcgctcgattaaacactcgctgcatgaatccctcgaccatgcgctggccggctccaggcatcaggtgttcgccctgatcgccatggtgttttttgccgtggcccgcgaagggctggagacggtgttctttctgttagccgtgtttcagcaaagcgaaggcccgggcgctccggtgggcgccctgctcggcctggtcctggccattgtcgtgggtttcctgatctattccggcagcatgcgcctgaaccttagcgcgtttttccgctggactggcctgttcatcctggtggtcgcggccggcattctcgccaactcggtgcaagccttgcacgaagccggtgtgtggaaccactggcagaccgtgctgttcgatttcagcgctgcattacccatggacagcccgctcggctcggtactggccggcatgttcggttaccaggaggcgccgactgtcagcaccctgggcgcctatgtgatttacctggtggtggccctggtgatgttcttcctgccctcggcccctagccagcccgctgccaacacctcttccgtttccagccagtaaggaccgtctcttgtccaacccaacccctcaatcggccccgccgtcccgcgccttgcgctggggcgtggctggctcggtggtggtgatgatcgccgccggtggcctgttctactacgcctcgcaattggccgcgaccaagcgccagaccaaccacaatgaaatcgcggtcacgattcacagtcacgcctgcgagcccaacgccctcaccgtgccggccgggcgcgcaagctttcgtatcatcaaccgctccgaccgtgcggtggagtgggaaatcctcgacggcgtgctggtggtcgaggaacgggaaaatattgccccaggcctgagccaggtgatcaacgccaacctgttgcccggcgactacgccattacctgtggcctgttgagcaacccgcgtggcaccttgcatgtcacgcccacggcagagtccgacgcccaggctaaggccaagccgtcgatggtggcctttatcggcccgttgtctgagtttcgcgtatacctgagcggccaaggcagtgccctggtcaaggccgtaacggcgctgcaacaggccatcgccgccggtgatctggcccaggcgcaggccatgtatgtgccggcccgtgaggcgtatcagcgcctggcgcctgcctctcaacgcctggccgaattggataacgcgatcaacgcccgcgccgactactttgaaaagcgcgagcaggaccccgccttcagcggcttccaccgcctcgaatacagcctgttccagcagcacagcctcgatggcctggcgccggtcgcccagcgcctggttaccgacgtcaccacgctcaagcaacagttactggcccagtccctgccaccggagcaactggtgagcattgtggtgcgcaacctcaatagcctggcggacgtgcgtgcggcgagcggtgaagaagaacgctacagccacatcgacttgaacggctttgccgccaatctgcaggtcgcgcacaaagtggtcgacctgatgcgcccgttgctgggcaagtccgccgccgacctgttgcccactatcgacagcgcgctcaacgccttcgacaccgaactcgaggggctcaaggtgaatgaccgctacccaacctacgacaaggttacagccgatcagcgcaagcagatcgccgataaggccaaggcactggccgttgcactcgatggaatcgaccccgcccttggcctttccggcctgcagtgaagacgaccgcatacatgagtgataaagaacagtttgacctccaacgtcgccgcgtcctgttgggcatggcggccaccggcgcggcgattgccggcagcagcctgtcctgcccggcgatggcagcagtggccgagcaagtcaccacggccccgcgtagcgacaagacccaggaccaccaagcgtttttcggcaagcaccaaagcggcatcgtcaccccgcgcccggcctgcggcatggtcgtggcgttcgatgtactggccagcgaccgcgaagacctggaacgcctgttccgcaccctcaacgagcgcatcgcgttcctgatgaccggcggcaccgtgccccaggtcgacccgaaattgccgcctaccgattccggcatccttggcccggtggtcacgccggataacctgaccatcaccgtgtcggtcggcgaatcgttgttcgatgagcgctttggcctagcggcggccaaacccaagcgcctgagtcgcatggtcggttttcccaacgatgcgctggagcccgcgcagtgccatggcgacctgagcctgcagttcagctccaacacgccagacaccaatatccacgccctgcgtgacatcgtcaaaaacctgcccgacctgctgctggtgcgctggaagcaagaaggcagcgtgccgccccaggcaccgtccaagcccggcgaaccggcgcagagtgcgcgcaacttcctgggctttcgcgatggctcggccaaccccaattccaacgatgacaaggccatggaccaaatcgtctgggtacagcccaccagcgacgaaccggcctgggccgcccatggcagttaccaggccgtgcgcatcatccgtaactttgtcgagcgctgggatcgcaccccgctgcaagaacaggaaagcatcatcggccgtatcaaacccacgggcgcgcccatggacggccagcatgaaacccaggtcccggactacagcaaggaccctgaaggcaagttgaccaagctcgatgcccacatccgcctggccaacccgcgcaccccgcagacccaggccaacctgatcctgcggcggccgttcaactactccaacggcgtcaacaaaaacggtcaactggacatgggcttgttgttcatctgctaccaggctgacctggagaaaggctttatcagcgtgcaaacccgactcaacggcgagccgctggaggagtacctcaagcccgtgggtggcgggtatttcttcacgttgcccggggtcaccggccctaaggatttcatcgggcgcacgctgctcgcggcaacgcactctcaaaatcctgccaagacctaaaacacaccagagcggaatgtctcccatgaagaagtcgtctatcgcgttgttgttactcagcctttcgccactggcaagcttcgccgctactgcgccgttggacctggtgggcccggtgtcggattacaagatctacgtcaccgaagaaatcggcgaactggtcacccagacccaggcgttcaccgacgccatcaataagggcgacctggccacggccaagaagctctatgcgccgactcgcgtacattatgagtccattgagccgatcgccgagctgttcagcgacctcgacgcgtccatcgattcgcgtgtggacgatcatgaaaaaggcgtgacggccgaagacttcaccggctttcaccgcattgaatacgcgctgttctcgcagaactcgacccagggcctgcaagcgctgaccgccaagctcaacgccgatgtgaatgacctcaagacccgcgtcgatggcctgactttcccgccggagaaagtcgtcggtggtgctgctgcgttgcttgaagaagtcgcggccaccaagatctccggtgaagaagaccgttacagccataccgacctgtacgacttccagggcaacatcgacggcgcgaaaaaaatcgtcgagctgtttcgtggccagatcgggcagcaagaccaggccttcctggccaaggtcgacaaaaactttgccagcgtcgacaagatcctggccaagtacaaaaccaaggatggcggcttcgagacctatgacaaggtcaaggacaacgaccgcaaggccctggtcggcccggttaacaccctggccgaagacctctcgaccctgcgcggcaagctgggtttgaactaacggccgcgcacaaaaaaacacccagtccctgtccaagggcccgggtgtttttttgccgataagttgctcggctagagaatgcggtacagcaagcgctcgatccgcacccggctgacacgccgcaggaatttgccgacagcgggcgggtaatccaccagtgtctgcaattgctggtaaccctggatacgcgtggtgtgctggaaaatattcgcaagctcggcgcttcgcggctccagccattggccttgagggtcgtcgatcagcaagccgttttccaggtcgaggcgaaacgcccgagggttgaggttgttgccggtgagcaaggtgtagcgctcatccacccacatgcccttgaggtgataagtattatcgccgtcgcgccataagtgcaggttcaactggccgctgttgatcatcggctgatgccgcttggcaaagcgccgcaggctgatctcgtacaagtacggcaacgccgcaatcaccttgaaaggctcggtgggcggaatgtagaagtcgttggcagtcttgtcgcccaccacgatgtcgatcttcacgccgcgtgccagggcgcggttgatctcacgggtcaccggcaatggcaggttgaaatacggcgtgcagatggtcagttgctgctgggcgctggcgatcagttcgaggatcacccggctcaacgggttgttcttgccgacgcccagcaaggggctgaccgacagatggccattgggcaactgcccggctgtggtgtcgtaggtcgcatgcttgagacggctgcgcaggtcgccgatatcgttgcgcaggctgcgggtggtgggcgggtttggcaggtccaggcgatgcactgccttggatgccaccaggccgtgttccaccaggtgctgcatcgaatcggccaagggttggctatggatcaggtggtagcggtcgaagcggtatttgtcgaacttgtgcaggtacacgttgttcaggctggcgccgctgtacagcacgctgtcatcgatcacgaaacccttgagatgcaacacgccgaacagctcgcgggtttgcaccggcacgccgtacaccggcacttcggtagcgtggcgctgggtcatcgcctggtaccaggcgctgttgcccggttgcttgcccgcgccgatcaacccgcgctgggcgcgcagccaatccaccatcaccacgatctccagttcaggccgtgcggccttggcggcgtgtagtgcgtcgtagatttcctgccccgcctcgtcctgctgcaagtacaacgcaacgatgtagatacgccgcgtggcctgggcgattttctccagcaggcagcgacgataggcgtcggcgctgggcagcacctcaatggcctcgttggacaacggaaaaccgcgcagcttgggcaacagggagcgtttgaagaacgacggcatagggctcgcaatgggtcgaatccgaagaggcccaaagcttacaccatgaggctgctcaggtctcgcggtgggtaatttaaaaaacgctgttgaccatgaagaacgatcgttctactgtactcgacatgaacgatataacccagaatgaaacccgcgacattatcctcgacgtcaccgagaagttgatctatcgccacggcatcgctgccaccggcatggacttactggtgaaaaccgccggtgtgtcgagaaaaagtatctaccgctacttcgccaacaaggatgagttggtggtggccgccctgcaacgccgcgacgaacgctggatgcagtggctgcgcagcgaagtggaacgccgcgacgacagcggcgagcgcctgctggggcttttcagcgcgctcaaaggctggttcggctcggcagactttcgcggctgcgcctttatcaacaccagcggtgaaaccggtgacgcccaagaccccgtgcgcctgttggccaaggcccataaacgcaaactgttcgagtacgcacttgaactgtgccaagcacatggcacccccgacccggagcagcaggccgcgcaactgctgatcctgatcgatggcgccattaccgttgccctggtcatgggtgattcaacagctgccgataatgcgcaatgcatggcgcgaaccttactgcaactgtgaacccacagcccaggcaactttcgacccaacctttattgctttgaggagacgcccatgtcagcccaagaagaagtccgcccgcccctgccgccgtttacccgcacgtctgccatcgaaaaagtccgtctggccgaagacggctggaactcccgcgacccgcagcgcgtgtccctggcctatacgctggatacgaactggcgtaaccgcgccgaatttgcccataaccgcgaagaagccaagcagttcctgacccgcaaatgggccaaggagctggattatcgactgatcaaggaactgtgggccttcaccgataaccgcatcgccgtgcgctacgcctatgaatggcacgatgattcgggtaactggttccgctcgtacggcaatgagaactgggaattcgatgagaacggcttgatggccaaccgctttgcctgcatcaacgatatgccgatcaaggaaagcgagcgcaaattccattggccgctgggccggcgcccggatgatcatcccggcctgtcagagctggggctataaccccgattctgtaggcagcgtgagatccaatgtgggagctggcttgcctgcgaaagcggtggtgcagtaacagattcagcgcctgacacaccgccttcgcaggcaagccagctcccacacttggatcgcggggcatcaattggatcaacctctgctaacagcgccctcccacacgtttagtcctgattcagccccacccgatacaacacaccgtcatcctcatccgtcagcacatacagaaagccatccggcccctgccgcacatcgcggatccgcgctttcaattcgcccaacaagcgttcctcgtgaaccaccttgtcaccctcgaactgcaagcgaatcagctcctggctgaccagcgcaccgataaacaggttgtgctgccaggccttgaaccggtcgccgtcatagaacgccatgccactgatgcccggcgacttctcccacacatgatggggtgccactgtgccctcggccgttttgcccttggcttcgggaatcggcagcagggaatagttgatgccatgggtcgccaacggccagccgtagttcttgccgcgctcgatgatattgacttcatcaccgccacggggcccatgttcattttcccagatcgtgccgctccaggggttcaaggccagcccttgcgggttgcgctgcccataggaccagatctccggacgcacgccgggctgaccgacaaaggggttgtcatccggcacgcgcccatccgggtagatgcgcaccactttaccttgcagcttgtccaagtcctgggccgtggggcggtcgttgttctcacccagggtcacgaacaggtagccgtcacggtcaaaggccaggcgcgaaccgaagtgattgcccgtagatagcttgggctcctggcgcagaatcaccttgaagtcctccaagccgctcaagtcagccgccaggcgcccacgccctacggcagtgccggccttaccgccctcaccaccgccttcggcgtacgacaggtacaccaggcggtcctgcttgaagtctggcgacagcaccacatccagcaacccgccctgccctttggcccacacctgcggcacgcccttcaagggcgcagagagcttgccgtccgggctgacaaaccgcaggtttccaggccgttcggtcaccagaaaaccttgctggtcgggcaaaaacgccagcgcccacggatggtccagacccttggcgatcggtgttgcggtgatgctaccttgctcgctggggaactgttggctatcggcggcatacaccgcgctcaacggcagtaacgcggtggcgcacagggcggccatcagggttttacgtacaaacataaggcgaaatcctcagcggcgattgccgttggcatcataggtgggcactttgggtgcggtggccgggcggctgggggccgcctcctgcttggggtagcggttgccgatgccgccgttttccagggtcggccgcgggttggccgggacaggctgaatgctgggaaccgcaggtgcattgggctgggtgccctgcatgctgttggggttggcccggtgaatcgggccgtggtcgctgctgcggcccggcaggttttgcgcctgagcccatggcccaacggccaggcccagcgccaatgctgcaagatgacgtacacaagggttcatggccaaacctctctatgccaggtactacgtgctttcgataacacgctacgccgtgggttcgggtggtgacactaaatagtttctcatcaggtgtaacacgatctgtccgagcatctatccgccgaaacttttgccctgcgctgcgagtcaccagcacacaggctcttcgttgaggaatcacacctatgccacgggcaatctggaaaggcgccatcagttttggcttggttcacatcccggtatcgctggtctcggcgacctcttcacaaggcgtcgactttgactggctggacaagcgcagcatggacccggtgggctacaagcgcatcaacaaaaccaccggcaaggaagtcaccaaggaaaatatcgtcaagggcgtggcctttgaaaaagggcgctatgtggtgctcagcgaagacgagattcgctcggcccaccccaagtccacccagaccatcgaaatcatcgccttcgtcgccagcgaccagatccccctgcaaaacatcgacacgccctacttcctcgccccggataaacgcggcggcaaggtctatgcactgctgcgcgaagcgctgaaaaaaaccggcaaggtcgcgctggccaacgtggtgctgcacaccaagcaacacctggctgcgttgatgccactggagtcggccctggtgctggtcatgctgcgctggcccgccgaagtgcgcagcctggacgaattggaactgggcagcgatgtgacaaaaccgaccctggccaaaggtgaattggacatggccaagcgcctggtggaagacatgagcgccgactggcagcccgatgaataccgtgacagcttccaggacaagatccgggcgctggtagcgaaaaaggccaaggccggcaagatcgaagacgtggaaaccgccgaaggcggcgaagagcgcaaatctgcggatgtcatcgacctgaccgaactgctcaaacgcagcctggcgggtaaacctgcggcgaaaaagagcaccgcgaaaaagtccaataacaaggcctcttgagcctgccattgacgggagaacaacatggcaaagcccctgagcgagtacaaccgcaagcgtgatttcaagatcaccgccgaacccgccggcagctcatccagcaaacgtaaagcctcggccttaagctttgtgatccaaaagcatgatgcgcgcaacctgcattacgactttcgcctggaacttgatggcgtgctgttgagctgggcggtgcccaagggcccgagcctggacccgagccagaagcgcctggccgtgcatgttgaagaccacccgctgagctatggcagtttcgagggcagcattcccgccggccaatacggtgcgggggatgtgatcgtgtgggatcgaggcatctggcaaccccacgatgacccgcgcaaggcctacgcggcgggcaaactcaaattcaccttggtcggtgaaaaactctccggtgactgggcgctggtacgcacccggctcaagggcagtggcgacaaagagcaatggctgttgatcaaggaaaacgatcagcaggcgcgcccggcctctgagttcgatattgtcgaggccaagcccgccagcgtgctcagcgatgcggtggtgggtaagccaaaagccacggccaaggccaaggccaaatccaaggcagcgccaaaagccaaagcgcccaagcgtaccgctgccctgccggatgagttcgcccctcaattggcaaccctggtggaccgggcgcccgaaggtgactggcgctacgagatcaagttcgacggctaccgcatcatggcgcgcattcgcgacggcgaagtgcgcctgttcacccgcaacggccacgactggaccgagcgcctgccgcgtcagtgcaaagccttacaagccctcaagctcaaggacagttggctagatggcgaagtggtcagcctcaatggcgacgggctgccggatttccaggcgctgcaaaacgcattcgatatcggctgcagcctggacatcgtctattacctgttcgatgccccgtttttgaacggtcgcgaccaacgcgaagacccggtcgaagagcgtcgtgctgcgcttaaatccgcgctgtccggcagccgaagcaaactgctgcgcttctccgaagcctttgccgccagccagcgcgatattttcgaaagcgcctgtgacctggccctggaaggggtgatcggcaagcgtgccggcagcccctacgtgtcgcggcgcagtgacaactggatcaagctcaaatgccgcctgcgccaggaattcgtgattgtgggctatacccgcccccaaggttcgcgcagcggctttggggcgctgctgctggcggtcaacgatgaggcaggcctggtgtatgccgggcgcgtaggcacgggatttgatcaggcggcgctgaaaagtgtctatgccaagctcaccgcgcttgagcgcaaggactcgccactgcaaaagccgttgaccagtgcccaggcccgaggcgtgcactgggttgagccgagcctggtcggcgaagtgcaatttgccgagtggacccgtgaaggcgtggtgcgccaggccgcgtttgtgggcctgcgtaccgacaagccagcctcgcagatcattcacgaacagccgcgtgcggccaagtcggtcaagtcggtcaagtccgtcaaggcacccgaggcatcgaaagccggtaaagcccaggcaacggtgaagaacgtgaaaatcacccaccccgagcgcattatcgacaagcacagcggcacgcaaaaacagcaactggcgcagttctacaccgatatcagcgaatggatcctgccctttctgcgcgggcgcgccgtgtcattgctgcgggcgccagaaggcattgaaggtgagcagttcttccagaagcactctgagcgcatgaccatcccccacatcaagcaattggacccggcgctggacccaggccatgcgcgcctgatggaggtagatagcgtggacgccctggtgggtgccgtgcaaatgggtacggtcgaatttcacacgtggggcgccaccacggacaagattgagacgcctgacctgttcgtcctcgatctcgacccggacccggccctgccctggaaagccatgctggaagcggcccaactgaccctgtcagtgttggatgagctgggcttgcaggctttcgtcaagaccagcggcggcaaaggcttgcacctgatcgtgccgttggcgcggcgcgatggctgggacaccgtcaaggcatttgccaaagccattgcccaattcatgacccggcaactgcccgaacgctttaccgccaccagcggccccaagaaccgcgtgggcaagatctttatcgactacctgcgcaacgcccgtggcgccagtaccgtggcggcgtactcagtgcgggcacgcccgggcctacccgtgtcggtgccggtgagtcgagacgatttgaaagggctgcgcggcgcccagcagtggacggtggcgaacctgcaccagcggttgcaggccttgaaggacgacccgtgggcggggtatgccaatcggcagaagatcagcaaaaagatgtgggacaagttgggcgcgcaaccccctgggtgatccgcgccctgagccaggtcagataagaatgaagatcagcgccagaccggcaaagatcgcccacttttccaggtagtagcgcgtgcggttgcgcttcttgagctccttgccacgcaggcgaatcttgtacagccgggtgaaggcacggttgaggccgccggtcttgtcaccctcatcgttgggcgaacccgcggccgccatcacattgcggctgaaccagcggttgaacgcagccgcccagcggtacttcatcggccgttcgatatcacagaacagaatgatgcggttctgttgggtggcgttttccgcgtagtgaatgtaggtctcgtcgaacatcaccggctcgccgtcgcgccagtaatagctttcgccgtccacattgatgtaacagcctggatcgttaggcgtatccagccccaggtgatagcggtacgagccagcatacgggtcgcggtgacgcaccagcttggagcccggtggcagttcggcgaacatcgcggccttgatcgagccgatgctttgcaccaactcggtggtgcgtgggcacagcttcatcgccgaggggtgactgtcgccgtaccacttgaggtagaaacgcttccagccggtcttgaaaaacgagttgaaccctacgtcgttgtattgctccgagcgtttgatctcacccgcgcgcatcagattctggccttcttcgcggatctcttcccagtgctcctgcaatgggctcaggtctggaaagtcgctgggcgagaggtagggacggctgggctgcttggagaacaggtacaggaaacagttgatcggcgccaggaacgtcgagtgatcactaagctggcgacccagcttgtgtcgcacccgaccacgcaggtgtacatacgcaatggaagcaacgtagagagcaacaatgatgagtttcaagggattcgtcacacgtcagggagagaacaggctgctcctgcgggcccacaacggccgaggatggataagcagcacctgaaatcacaattcacatacaggcgacacgcccggcggataatcgcctgcgtgcgtccattggcagttatttagccacactttgtaaccaaaggttaactaagaattgtgaaaagctgtctactgagtgtgctgggggtaggcgcaggcaggcccgtgagcctgcctgtttgaagggttacagcggtgtgtctttatcctcgcggcgatcgcctaatgccgtataagggacggcctgagtgcggctgcgaacgaagtagcggatcagcgcaatcatcaggcccagcaacagcccgccgaccaggctcagcgcgatgaccagcggttttttcggcttgatcggcgacagaggctcctgggctcgacggtcaatcgtcaccagcttgaggttgctcatgtcgatgttcaaaccacgcaacctggcgacttcagcgcgaagcggctcgacgtcctgcaagaagatgtcttcattgccacgcttgcgcagcacctcaacctcgcggttgctttccagcagttgcagctctttgccgatctcggcaatgcgcgggttggtaaagtcatcactggtacgctgctgcaatgcagcgcgctcggcttccaacgcctcggtccccatgaaatacagcgggatcttctggttgttcacctcggtacgcatgacctggctcgaacccgtgcgggtggagtcggccatagaggacggcgttgtcggcgtacgaatgcccatggacttggcaatgctgatcgcttcggccaattcggccaggcggttggtgcgctccatcttcatctgcaagcgcaaagcgctgagctcgtcctgcagttgggcacgcttgagccggtcggcttccagcagcttggcgattttcgattctttatcggtatcgtagttggcgcgggcggcgtcgatcttgcccttgagctcgctcaagcggttattgacgatcaccttcaggtcagcacccacctgctgacgctcggcggcaatggcgtagtccacaaaaccgttgagaatcgcaacaccgtcgacgtcggtcgggtattgcagctccagacgaatatagctgctcaacgaatcggatttcttcggatcgggcaaaatcagattgaccgaattgcggttgaacgcctcaaagctctgctcaagggtttgccccggtttcttgaacgccttgaacaactcctcatggtccttgaagaaccccaggcgcgcatcataagagtccagctgtgcacctactttgagcaacgcatcggcaggcggcaacttatacacttccgaacggttcaaggcgtctagctcgttgattgcagcaggccgcaacacactgctgacttcataggtcttgggtgccagaaaggcataacctgcgcctaataccccggccagaagcgtacacccgaccaccagctttttttgtcgccagatggcgtgaaacaattcaaataaatcaatttcatcagacgctgcggaaggtggaagcggggaagtacgattcaaaataagaacaccttaaaataatactaaaaggccatcattctcagaagtctaaaagacttcaaaaatcagggacaacgccctggatacggcagaccaatggcgatgtgaccactcagtcccctgaaatatcccacaaacttagggattatttcggtttcatttcggtgagtaagccaaatgacacagccatgtcagactgatctggttgcaagcgtagtcaatacaacatgaaaaagctgtcaaatacctgtcttataaagaaaaaaatttcgcctacaggtggaacagtgtcagcctcaatacaattgaacatttttttgaacagcaataaggagtttgcatgtcaccgctttcagcctcggactttcacgcactgcaaggcacttgggaacaaaccgcccttgaagacagtggcgtgctcaaccccgtggatgcccacagcgcgccgggagcgataacgacaattgcaggggatcgcttcgaagtgaccacggtcggtggcgaagtattattggcaggacgcttcgtactggacgccagtaccacgcccaaaagcattacctggacggacgacataggtgatgacgcaggcaagcagctccccgccagttaccggctcgacggcgatgatttcgtatttatcgcagcggatgaaggcatgcccaggcccaccgtgttcagcaccggcccggggcaaaccatgcgcaccttcgtacggcgctcttgatcaaatgtgggagctggcttgccagcgatagcggtgggtcagtcaactaatctgtcactgatacaccgctatcgcaggcaagccggctcccacatgttggaacgaggggcgtcaggcagataggcggtggctggcaggccgttacgggagcaagctccctcgccacaggtggacacataagacgtgattatccgatttgatcacggcattttcacaaggccttcacttttccacctataaggtcaggcctacctactccagtgaatcacttggcccgccctctcctcgcgggcgtttttttgccagcgcaaaccttgatcagccatcacgcttgatcgctgtcagggtaaagcacaggggcatttgcgcgacctgatgctcatactgttcgtaaagttcttcccggttgcaatgcgggtactcctgcaaatgagcgatccgcaactgcgctgcgatagccccgctgaccacgctgcccagggtatgtacgtaccaataggaggtcggcccgggccgctcatccttcccttcatagacaattgcctcctgcagcacaacgggttcacgctgaaagtaagaactggcaggcagcatcgggttggccccacaggggtcaaacacctcgagaaagggatgggtttcgtacatgaccagcgtgccgccgggcttcagcacactggcaacctggcgcatgaacagcgccacatccggcatccaacccagcacgccaatggtcaccagggcaatatcgaagcgtgcctgcaaacgctcgggcaaatggtggatatcggtctcaatgaactcagggctatgcggcgagacctcggccaattcccgcgcctgttcaagaaacgccccggattgatcgacccccaccaccgaacgcgcgcccaagccatacagcgataggctttcgcgcccgttgttgcagcacaattgcaccacatccttgcccattacacccacctcttgcagcaaggtggtgatggtcgggtcaaggcaggaaaaatcaggctcggctaccgaggccagcagtgccgcccaggtcgcggtgtctttgtgcaacccggcggattcgtcccaggcatttctattgctggcgatcgcctcttgcgctgagggcatgtccattgcttctccagaaattcagtccagtgggctttggaaagtaaattaaatgcgcgcaggaggaaaccctggcccaccgcgaaacttatcacccagcccaccggtcattaatccaacgcgtgttcagcccctgaacgccgctcttgaaggtcgtaccgtggcccgtcattcagacctgcgcatcgctctatccctggacagcctgaacttctttctcgccgatgtgcgcgacggtctcggaccgtacctggcgatctacctgctggccgtgcatcaatgggagccggccagcattggcgtggtcatgaccctggccggcatcgctgccttgttgacccaaggccccgcaggtgcgctgatcgaccgcactcgcagcaaacgtgcggtggtagcccttgccgcgctgttggtgacgggcagttgcctgatgctgccctttgtcagttcatttggttgggtggcgttgacccaggccgccagtgctgtagccgcctcggtatttgccccggcaatttccgccatttcgctggggatcactgggccgcgcgcctttacccggcgtaccgggcgcaacgagaccttcaaccacgccggcaatgccgtggccgcgttgctggccggcgggctggcctacctgttcgggccggtggtggtgttctacctgatggcgttcatggccgtcgccagtgtcattgcggtcagttgcgtgccggccagggcgattgaccatgaggtcgcccgtggtttcgatccagcccatcacaccgaccatgaacagccctcgggcctgaaagcattgctggccaaccaaccgctgctactgttcgccatctgctgcgcgctgtttcacctggccaatgccgcaatgctgccgctggtcagccagaaactggcgcagatcaatctgcagatggccaccccgctgacttcagcctgcattgtcgccgcacagttggtgatggtgccaatggcctggctggtcgggctcaaagccgatatctgggggcgcaagccgctgttgcttgtaggtttcctgatactgccgctgcgtggcgtgctctataccttgtccagcgacccctactggctggtggccgtgcagatgctcgacggtatcggcgccggcattttcggcgccctgttcccggtgatcgtcaaggacctgacccaaggcaccgggcgcttcaacgtcagcctgggcgccctctccaccgtatttggcctcggcgcggcgctcagtagcagcctggccggtttcgtggtgcagcaggctggctacaacgcggcgttcctgacgttggcggcggttgcagccgttgccttgatgctgttgtggctggccatgccggagaccttggcaaaaccatccttcgctcgccatacaactgtcgcctgacatatgcgacaatgcgcgccaaattccaacacacatccaaaattttgtgttcagcgaccgggtttcgcgccttgatgtcgctgttgacgcatgcctgaaggcacctgccgtcacgctcgcaacccattgataggtaaagtaattgatctccacagctaacatcaccatgcagttcggcgccaagccgctcttcgagaacgtctcggtcaagttcggcgccggcaaccgctatggtttgatcggtgccaacggttgcggcaagtcgaccttcatgaaaatcctcggtggcgacctcgacccgtccggcggccaggtcatgctcgagccgaacgtgcgcctgggtaaactgcgccaggaccagttcgcctatgaagaattcaccgtgctcgacaccgtgatcatgggccacgaagagctgtggaaggtcaaggccgagcgcgaccgtatctactcgctgccggaaatgagtgaagaagacggcatggccgtggccgagctggaaaccgagttcgccgagatggacggctacaccgccgaatcccgcgccggtgagctgctgctgggcctgggtattcccctggaacagcatttcggcccgatgagcgaagtgtccccaggctggaagctgcgcgtattgctggcccaggcgctgttctcggatcctgaagtgctgctgctcgacgaaccgaccaaccacttggacatcaacaccatccgctggctggaaaacatcctgacccagcgctccagcctgatgatcatcatctctcacgaccgtcacttcctgaacagcgtgtgcacccacatggctgacctggattacggcgagctgcgcctgttcccgggcaactacgacgagtacatgaccgtggcgacccagtcccgcgagcaactgctgtcggacaacgccaagaagaaagcgcagatctccgaactgcaatccttcgtcagccgcttctcggccaacgcctccaaagccaaacaggccacctcccgtgccaaggcgatcgacaagatccagctggccgaggtcaagccatcgagccgtgtgagcccgttcatccgtttcgagcagaacaaaaagctgcaccgtcaggcggtcatggtcgagaagatggccaagggtttcgacggcaaaccgctgttcaaggacttcagcttccaggttgaagcgggcgagcgcgtggcgatcatcggcccgaacggtatcggcaaaaccaccctgctgcgcaccctggtcaacgaactgaccccggacgccggcagcatcaagtggaccgacgccgccgagctgggctactacgcccaggaccacgcccacgacttcgaagacgacgtgagcctgttcgactggatgggccaatggacccaaggcgagcaaatgattcgcggcaccctgggccgcatgttgttctccaacgacgagatccagaagtcggtcaaagtgatctccggtggtgaacaaggtcgcatgctgttcggcaagctgatcctgcaaaagcccaacgtgctgatcatggacgaaccgaccaaccacttggacatggaatccatcgaagcgctgaacctggcgctggagaactacccgggcacgctgatcttcgtcagccacgaccgtgagttcgtatcgtccctggccacccgcattatcgagttgagccctagcggcgtgatcgacttcagcggcacctatgacgactacctgcgcagccagggtgtggtgttctaagagcagcacttagctgcaagcaaaagccctgcccctgtgacggggcttttttgcatcagcactgtgccgggcgctgattttgtaggccatgcataaccaatgtgggagctggcttgcctgcgaaagcagtggttcagctatagattcactgactgacacaccgccttcgcgggcaagcccgctcccacaggaaactgtgccagacgctgattttgtgggccatgcataaccagtgtgggagctggcttgcctgcgatagcggtggttcagttatagactcaccggctgacacaccgccttcgcgggcaagcccgctcccacagggatcgacggtaggcgtccctcgctcctacagggaggcgggatatgccatgatgctttaccgcccgccagcgattgagtattcatgcctgccgccccctcctccctgtcgatcaccctgcagatcgtttccatcgtcttctataccttcattgcctttatctgcatcggcctgccgattgcggtgattccaggctatgtgcatgagcaactgggcttcagcgccgtggtggccggggtgacaatcggctcgcagtacctggccacgctgctcagccgtccgatggctgggcggatgtcggataacgtcggtaccaagcgcgcgatcgtgctgggcctggccggcattctgatcagcggcgtactgacctttatcgccacgctgctggacagcctgccgagcttgagcctgggtattctgatcgccggtcgcctgttactgggcgtggcccagggcctgattggcgtggggaccatcagttggtgcatgggcgcagtgggcgccgagcacaccgcacgctcgatttcctggaatggcatcgcctcctatggcgccattgccattggtgcgccgttaggcgtggtgatggtggctgactacggctacaccagcctgggtattgccctggcggtgttggcggcgttgggcctggtgctgatccgcaataaaccgtcggtgccagtggtacgtggcgagcggctgccattctgggcggtgttcgggcgtatcgcgccgtttggcaccagcctgtgcctggcctcgattggctacggcacgttgacgaccttcatcaccctgtattacctcaatcgtggctggaccggtgcggcatattgcctgacggtatttggcgtgtgttttatcctgtcgcgcctggtgtttatttcggccatcagccggtttggtggattcaccgccgccatcgcctgcatgctcatcgaaaccctgggcctgacgctgttgtggctggcgccgtctaccggcgtggccttgatcggcgcagggttgaccggctttggcttgtcactggtttacccggcgcttggcgtggaagccatcaagcaagtgccagacagcagccgcggcgcggggctgagtgcctatgcggtgtttttcgatctggcactggcgattgccgggccgttgatgggcgccgtggcgctgaacctcggctatggctggatcttcttctgcgcggcgttgctgtcggtcagcgcgctcggcctgaccgtattgctccggcgtcgcgcctactgatcagcggtctgcaagccggcgcgggtggcctcgcccagggtatggctgaaaaaacgcccggcctcggagaccagatcgcggtggatgccttctcgatcaaccccatcggcatccgtgcaaatggcgggcatgctcgccagttgatcgctgtcacacggggccatgaacacgaagtgcccggccccggccaacagtttgaaatccgggggctgcggcaacttgcgcgccagggcggcggcgttcttgtccacggccaccaactggtcgccatcgccactgtagagcagcaccggcacatgcacgtccgccagggtgtggcggccaaacatcaagctcagcggcgccatcagcatcaaggcatggatgcgcggatcggcctggggttgcaaatcgtcgcggtcgaccaccagctcgcccttggtggtgcacgcgtcgcggtcttcggggcgctcttggcagtagcggcgcagacgttcgaaatcaggcttggcgccggccaggatcaatgccgtctcgccaccggctgaatagccgatgacgccgatctgatcaatatccacaaagggcgacagcatcggctcggccaaggcggcggtgatcgcctgggaaatctggatcggccgaccgtacaaattgctcacggtgcccaggcggctgtggtccttgtagttgtcaccgggatgcagcaccgccaccaccacaaaccccttgcgcgccaaggcggtggccaggtcatgcagggccagcggcgtgccggtattgccgtgggacaacatcagcatcgggaatcgcccgatcgccaccttggcatcttcgctggccgccacatggtaggcgcccagcgcggtggtgcgctcggcatcggtggaggggtagaacgcgatggctttcatcggctgcgcatccagcgggtcgagaaaactcatgcgatgaaaccccacactccaatgggggcgcggtgccggcgcggcgtgcactgaaagcaggccgcccaacagcgaaagaaccaaaacagcacaaagacgcatcatggggatgtccacctttgctgcacaagaaccggcctgtcgaataaaaagtccagggtatcgaatggatgtttgcataacccgggccacaacgaaaaaactccgtactccgctcgcgttcaggcgatcagaatacagagtttaggcgctcggtttcagaatgaaaccgaggacagggcaaatttacataagccttacgcagcggcgaacagttgctcgttgatgcgcacgttggcgtcgctcatggctttgctgcgcacttcatcaccgtaggccaggccttcggcgcggacgatctcgatgtcggtgatgccgaggaaaccgaacagcagcttcaagtagccttcatgggcagcgcccgaagcttggtcggcatgcaggccgccagcggtggagacaataatgaccttcttgttgccgcacaggccttcagggccggcttcggagtagcggaacgtctggccggccaccgcgatgcggtcgatccaggctttcaattgggttgggatggtgaagttgtacatcggcgcacccaccaccacagcatcggcggcgagaaactcagccagcgacgatgcactcagttcagcctcgtgcttttgcgccgcatcgcgcagttcagcggcagtgcccaaggcgcccagggtagcgccggagaaatggttgatgccttcgctggcgaggtcgcggtaagtcacttccacgcccggctgagcggcctgccacgccttgaccacaccggcgctgagctgacgggaggccgagttgtcgccgaggatgctggaatcgatgtgcaacagtttcatgatggatctccgaggtgggatcgacagtggcgatcagatggtggtgatgctacgcatgaaaccaatggtcgataagccatctgaaatgcgatagtttgtcccactgacaggacaataggcccaccatgcaagacctcaacgacctctactatttcgctaaagtcgtcgaagccggcggttttgctgcggctggccggctgctcgggattccaaaatccaggttgtcacggcgcattgccgagctggaagaccgcctgggcgcacgcctgctgcaacgcaccacccggcaactgaccctcaccgccgtgggtgagcgctacctgcgccactgccaggccatgctgctggaagcggaaatggctgacgaggccgtggccagtatgtccagcgagccgcgtgggcggctgcgggtcagttgcccggtggggctggcccaacacatcctgccggagttggtggcaggttttctggccgctcacccgctggtgcagttggacatgaccctggtgaaccgccgcgtcgacctggtggccgaaggcattgatgtggcactgcgcgttcgcgaacaaggcgatgaagacccgttgctggtcaccaagcgcctgcgccaggcgcacaccgtgctggtggccagccccgcgttcatgcgtgatcggcaggtcgaaaccctggaagacctcaaacagttgcccatactcggcgcacttgaggccgaccgaatggtgcatcaacgcatcatcgatccccagggcaatacccatgagctggtgatggaagcgcgcctgggcatcgaggactttatcgtgcgcaaggccagcgccatcatgggcgtgggctttacgatactgccgatgatgtactgcgaagaagaactggccagcggccggctggtgcaactgctgccgcaatggtcattgccgggcggctggctgcaggcggtgtacccgcaccggcgcggcgtgctgccggccatccgggcctggatcgactatctggaagaaggcttcaaaggctgtggagatcggctgttatgagcatgacagaagaacaagtcgcgcgtttctgcctgagcctgccaggcgcacgggaagactataagtggggcggcgtgcgggtgttttcgattgccggcaacaagatgttcgccttgcagaacctgcgcggtgagtcgctggccttcaaggtcgacaaggagctgttcctgggccacgtcgaccggccgggcattcacccggcgccttacctggcgagggcacagtgggtcatcatgaacacgccctaccctttgggcgctgaggaactgcgcggcttgttgcagcgctcccaccagttggtggtcagcaagctgcccaagcgcacgcagattggcttgtggctagaggattgacagcaaggtgccgccgaggaacaactggtccagccagaacacctggtgcaacagcacaatcacccagaacagcacctggtaagacaccttgcgcgtcttgtgccggaacacctgctgggcgatcaacgcccccggccaaccgcccgccagctccaccgcgtgcaggatgttttccggggtgcgccagccttcggtctgggccttgcgcttatcgctccagtacaggaagaacgccaccacgctgaccacaccgtaggccatcaacgggatgaccgtttcgccgcgataccacagcaaggccgagcccagcagcggcgcggcacacagcagcacaaagagcagcgccttcaggcgtggatgctggatgctcatggcttgaccgcagtccagtcgatccagccgaactgccaggtcgccaggatcaccaggccgaaggcaatccgataccaggcaaacgccgcgtagctgtggctggcgatgaacttgagcagggccttgaccgcaatcatcgcgaagatgaacgaggtgacaaagccaatggcgaacaccggcaagtccgcgggctggaacaggtcccggtacttatagcccgagtacaccgccgcaccgaccatggtcggcatcgccaggaagaacgagaactcggtggccgtcttgcgtgacaggccgaacaacaggccgccgatgatcgtcgcaccggaacgcgaggtgccggggatcatggccaggcactgggccaggccgactttcagggcgtctttccaagtgatgtcatcgacgctctcagcccgcaccgcatgctggcggcgttcagcccacaacatgatcacgccgcccaccaccagcgctgtggccacggtgatagggttaaacaggtagtgcttgatcaggtcggcgaagatcaccccgagtaccaccgcgggcaatacggcgatgatcaggttgacggtaaagcgccgggctttgggctgggtcggcaggccgataaccacgtcaaagatcttgcgtcgaaactcccagaccaccgccaggatcgcgcccagctggataatgatgttgaaggcttcgaaacgctcgccaccaaagttgatcaggtcggcgacgatgatctggtggccggtgctggagatcggcaagaactccgtaagcccctctacgatgccgagaagcaatgcctgtatggcggtccaaaaatccatgctgtctccaaaggtcatgcgcggggcatgcctcttagtcttttttaagttcactgacgacgagcgcacacaagcgcccgcggttgattctcaacgccggtctgcaaaaattccgtgaaaaatcaggcagtactcaggtttttcgattccgggccgaaagcctatcagacacgccggaaatctcgaagcagcaccacaattataaagagcagggagtgacaggacgatgaacagtttgcgcagcatgtcgatcagccgccgcctttggctgatcctgatagtcgccgtgttgatgctgctggccttggggctgttgatgctcaaccagatccacggcgacctctaccaggccaagcgccagcagacccagcacgtggtacagaccgccagtggcgtactcagctattaccagaacctggaaaaaaccggcgtactgacccgcgacgccgcgcaacaacaggccttgagcgcggtgcgcggcctgcgttatgaccacgacgactacttctggatcaacgacctcacccccgtgatgatcatgcacgcggccaaccccaagctcgacggccagaacctctcggcgattcgcgacccggacggtttcgccgtgttcaacgaattcgtgagcctggccaaggccaagggtgccggcatcgtcaactaccgctggccgaagcctggcgccgaagcgccggtagagaaaacctcgtacatccaactgttcgaaccctggggctggatcatcggctccggcgtctacgtggacgatgtgcaggccgaattcaggggccaggtgtggaaagcctcggccattggcctgggtattgcgctgatgatggccgtgctggtggtgctgattgcccgcagcatcgtgcagccgttgcaggcggcggtgaatgccatgggcaatatcgccagcggcgaaagcgacctgacccacagcctcgacacccacggccgtgacgaattgacgcaactggcccagcacttcaatagcttcaccgctaaactgcgccaggtggttggccagttgcaggtgtgcgcgaacgccctgggccagtcgtccaccgaactgggccacaacgccagccaggcccatgaccgcagccagcagcaatcgcaacagatggaactggtggccaccgccatcaacgaagtcacctacggtgtgcaggacgtggcaaaaaatgccgagcacgctgccagcgaaatgcgcgatgcccaggcccaggcccaacagggacaggtcaatatcgacggcagcttgcagcagatcgaccagctctccaccactattagtcaggctgttgaggtgatccgcacgctctccagcgaaagcacgcagatcggcggggtactggaggtgatccgctccatcgccgaccagaccaacctgctcgccctcaacgccgccatcgaagccgcccgcgccggtgagcaaggccgtgggtttgcggtggtcgccgatgaggtgcgcctgctggcccagcgcacgcagaaatccaccgccgagatccaggtgatgatcgagcgcctgcaaggccactcggaagcggcggtcaaggtgatcagcgacagccacagcgcctcgcaactaaccatcgaacaagccggccaggcgggcgcgagcctcaccgccatcggccaggcgctgcacaacctcaacggcctgaacgcctcgattgccagcgccaccctgcaacaggcccacgtggtggaagacatcaaccagaacgtcacccaagcggccgggctgtcccacagcaccgcgctggcggcggagcaatccagcgtggcgagtgcacagttgcgtggcttgagcgagcagcttgatgggcttttgcgtcagttcaaggtctaaagcccctcagcggtgggagggctgccctctcccaccgcctagcggcctcacatccccagccactgcggcagcgcgagggaaatgaacggcaggtaggtgaccatgatcaggaacaccaacaggatcatcagccacggcatcgccgcgcggatggtctgccccagggtcagccccgtcaccgccgaggtcacgaacagattcagccccaccggcggatgcaccaggccgatttccatgttcaccaccatcacgatgcccaggtgaatcggatcaatgcccagcttcatcgcaatcgggaaaaagatcggcgccaggatcagcacaatggccgaaggctccataaagctgccggcaatcagcaacaccacgttgaccatgatcaaaaagccaatcggcgtcagcccttcggagatcacccaagcggtgatttcctgcgggatctgctcggtggtcagcacgtgggcaaacaacatggcgttggcgatgatgaacatcagcatgatcgacaaccgcccagactccagcagcactttggggcagtcacgcagcttcatgtccttgtagacgaacagcgcgacaaacgccgaatacaccgccgccaccgccgccgcctcggtcggggtgaacatgccgctgtaaatgcccccaaggatgatcaccagcagcaacaggccccagaacgcccggcgtgcgcagctcagccactcacggaatgtcgcccggggttgcgctggcagcttcttgatgcgggcgacgatgtagatcgcgaccatcaacatcaggcccagcagcaaacccggaatcaccccggccatgaacaatttgcctactgaggtttcggtcgccgccgaatacaccaccatcacgatcgacggcggaatcagaatgcccaaggtcccggcattgcagatgatgcctgccccaaactccttcgggtaaccggaacgcaccatgcccgccacggcaatcgagcccaccgccgccaccgtggccggtgatgagccggacagcgccgcaaacagcatgcacgccagcaccgccgcaatcgccaggccaccgcggatatgcccgacacaggcgttggcaaagtcgatcagccgctgggccacgccgccggtggtcatgaaggcgccggataacaggaaaaagggaatcgccaggaaggtgtaggcgtcgctggtttcaaacaacttgatcgccagggagctcaccgagtcctggctgaacatcaggatcgacaccgcaccggacagccccagggcgatcgcaatcggcacgcccaggaacatgaacacgaataacagtagaaacagacagagcacggccatcagtgacgctcctcatggctgccggccaacttgctggcctcaccggcctcgtcggccaaccccaaccccacctggcggtgggtaaagatgcggtagaaaatttccaggtagcggatcaagaccaaggcaaagccaatgggcacgatcaccacgatgtcgccgacatcgatgccgaactggtcgaggtcttcggcgccgatatgcgcggtcattaccgcactcacccacttgtagctggccaccatgaacagcccggcataggccaggcagcacaggcaggcgagcatgccgagcaggcgttgcaccgggcgccgggtcagccggaccagcgcgtccacgcccaggtggccagcggtgcgcacgccgtaagaaatgccgaagaaaatcaaccagccgaacatggccttggtcagcgccacgctccaggtcatctcttgggccaaggtcatggtgccgtcgcccagggcattgaagaaggcgctgctccaggcccacttgtcggccagggcaaagaacagggtgtagacgttgttgagcatgacgtagacgaatgtcaccagggtcatggcggccagcaggaaagcaatgaagccttcctccaggtgctcccagacgcgccttagcgtttgcatggcaaaacctcgcgaggcagagataggtaaaagccaggtcaacctgctagatcgttcccacgctccgcgtggtaatgccgccccggacgttccacgtcctgtatcacgccgtgcgtaaggcgacgcggagcgtcacgggatgcattaccacgcggagcgtgggaacgatcagtcgcgggcaagcccgctcccacagggggttactggttggactggtccgccgccttgatcaggtcagccccaatctcgccctcgaacttctgccacaccgggcgcatggcttcgcgccacagcgcacgttgcgcgggggtcaactcgatgatttcgctggtcttggcgtcgatgatcttctgcttggccgactggttcagtgcttcagcctgcttgttcacctccacggtgacctcggccatgatctgctccagggtgctgcgcacatccggcgccaggccgttccagaatttcgcattggtgatcaccatgtagtcgatcagaccatggttggactcggtgaagtacttctgcacttcgttgaccttctggctttcatagttggaccaggtgttctcggtgccattcacggtgccggtctgcaggccctggtagacctcggcaaagctcatcttgcgcgggttggcgcggatcgccttgaactgttcttcgagcacactggaagcctgcacgcggaacttcaggccacgggcgtccttgggttcatgcagggccttgttggcagagagttgcttgaggccgttgtgccaataggccaggccaaggatgttcttatcctgcatcgaggtcagcagtagcttgccctcagcggcctggaaacggtcgacggcggccaggtcgttgaacaggaacggcaggtcgtagatctgcacttgtttggtgtagtgctcgaacttggccagggacggcgcgagcatttgcacgtcgcccagcaataacgcttccatttccttgccatcgccaaacagcgacgagttcgggtacacctcaaccttgaccttgccgggcaggcgctcttcagccagttttttgaacagcagcgcgccctggcctttaggagtgttttcggccaccacgtgggcgaacttgatcacaatcgggtctgccgcctgggccaggcctgcggtaaacaaggtggcggcgcacagcagcgcccgggaaagcttgagcatgggaatcaccttcttattgttgtgttgtaaggcaaggtgcctgatgtaacgcgtgtcgtgaatttcgaattttagatacctgcgttcggcctggccgaacgcgtccagtgtgagagctggcttgcctgcgatagcggtgtgtcaggcaacacaaacattgactgttctaccgctatcgcaggcaagcctgctcccacattttgctcccggttttgtcagttacagttgcgcggccagcagccgctgcgcgcgcagcagtaccggcgcatccaccatctgcccgtcaatctgataagcccctgccccatgggcacccgcctccaccacgcgcctggcccaggccagctcttcggcgctcggcgccagcgcggcatggatcaccgcgacttgcttgggatgaatgcacaatgccccggcaaagcccatctcataagcgtgccggatcgagcggtgcaggccttcggggtcgtcgatggccgggtgcacgccgtccagcggcgccgccaggcccgccgcgcgcgaatgcacgatcagcgccaggcgcgcctggtcaagggccagttcggccgcgtgggagtgactgctcaggttgaggtccagcgccaggtccaaaccgccgaacgacaggcgctctacctggggcgcctgggcaatctgcgccagcgccagcaaaccccgtgcgctttcaataatcggccagatacgtttgccggtcgcggccaccaccgccacctgggccgcgctttcgaccttgggcagcaacacccccgccacatttgcatgggacttgcagaaggcgacatcggcaaaatgctcggcatgctggggcgcgttgatgcgtacccacacctgggcttcggcatgcgcatgcaggaacgcgcccagattatcccgagcctgacgcttgagcggttcttccaccgcgtcttcaaaatccacaatcaccgcgtcggcgccgctggccagggccttggcaaaccgctccgggcggctgcccggcacaaacagcgcagaacgtactaatggctttggcatcacttgattcctgattagataacgccgcgctcgcgcaggctgttaatggcctcaacggaataacccagctggtcgaggatgccttggctgtgttgccccagcgctggcacgccgtccatgcgcggggtaaacgcagcgttacgcgccggtggcagcagcgacggcaacggccccgctgggctgtcgacttcgcgccagcggtcgcgggccttgagttgcgggtggtcccacacgccttgcatgtcgttgacccgcgcactggcaatctgcgcgtcttccaggcgctggatcaccgcctcgacgtccagtggggcaaagcgctccacgatgatctggcgcagcagctcgcggttggccgagcgcttgaagttggcgctgaagcgctcgtccgtggccagcgacgggctgagcagcactttgtcgcagaacgccgcccattcgcgttcgttctgcaagccgagcatcaccgtgccgccgcctccagtgggaaacggcccgtaagggtaaatcgtcgaatgcgcggcacccgcacgcggtggcggcggcgcgccgtcgaaggcgtaatacatcgggtaccccatccactccaccaggctttcgagcatgctcacatcgatacggctgccctggccggttttgccgcgcagcagcagcgccgacagaatgccgctgtaggcgtacatgccggcggagatgtccgcgatggagcaaccggccttggccatctgttcttcacctgggccaccggtcaccgagagaaagccgccctcgctctggatcaacaggtcgtaggctttctttttctcgtagggcccgccttcgccgtagccggaaatatcgcagacgatcaggcgtggaaagcgcgcgtgcagcgcctcgaacgataagcccatgcgcgccgccgcgccgggggcaaggttttgcaccagcacatcggcatcggccaacaacgcgtcgagaatggcgcccgcctcgtcctgcttgaggtccagggtcaggctttccttggagcggttggtccagacgaaatgcgacgccaggccgcgcacccgctcgtcatagccacgggcgaagtcgccggtgccggggcgctccaccttgatgacccgggcaccaaggtcggccaactggcgcgtacaaaatggcgcggcaatcgcgtgttccaggctgacgacggtgatgccgtccagcggtcgttgttcagtcatcacaattccctccaagccaatgggccatggacgcggtagtgcgcaggttccacacctgctcgatcaggcggttggcctgggacggggtgcgggcgccgctgaagtgggccaggcgctggaacttatccgccagctcggcgcggctcagggtgttgcccgggtcgcccttgggttcatcaatggcaccgtgcagcgtgcggccatcggtggtggtgacggtgacgcggcccagccagcgttgcgggtaggcgctgtcgacctcggggtccaggctcatgcagaccttgtcgcgaaacgccgcgaccgcaggatcgctcaacgccaggtcatggaactcaggcaacccggcgtggccatgcacagcgatcaatccaagcacggtgcccatggagaatttggcctggtgcacggtggccggcaccgtcactcggccgagtacgtcgatggcgccttggtgcacgtgggtttgcacctgggaaatctgtgcagcgctcaaaccttcacgctgcatcaagtccaatagcgcatcggcagcgggatgggtgtgacggcaggaagcgtggaacttgaacgaggtttccaccagtgcccaacggctgcccaggccggcagacaatttgcccggctgcgcatcactggacatgcccgccgccaaaccctggtccccttcaagaatattgcgcgcgccggtcagcccatcggccgtaaggtaagccgccagaaggccgtccgccgcggccttggccgtgtgcagttgcttggagtcggcggcatcgcgcagaaattcccagagcccggcggcctgggtgccggcgctgccgagcaggttgatgaattgctcttcgttgaagtcgagcaacttgcccaccgcgaccgctgccgccagggtgccgaccgtggccgtggtgtggaagatgcggtagtgggaacgccccaggaactcaccgatgcgaatccccgcctcatagccggccaccgaggccagcaacagttcacgaccagacttgccgaggtcctgggcggcggccaatgcggcgggaaacaccacggtggccgggtgcagcaccgagctgttgtgtaagtcatcctgctccaccaagtgcgaggaggcagcgttgaccagtgcggcgaaatacgcgctggtgccggtgccgttgacgatcacctgggccgggccgctgctcgggcccatcttctgtgcgtagcgctcaaacaggggaatcgggtgcgcgccctggctggccaaggcggatgcgagccaatccaggtaaagctcttcggtgcgcgccagtacgtgctcgggcaactgcgcgtaagtcagctcggccaggaaccggcaaagggcttgggtatgatgcatgctcaacgccctcagaagctgcgcggcagttcgagcaaatgctcggccacgtaggacaggatcaggttggtggagatcggtgccacctggtacaggcgggtctcgcggaatttgcgctccacgtcgtactcgcaggcaaagccaaagccgccgtgggtttgcaggcaggcgttggccgcttcccaggacgccttggccgccaggtacttggccatgttggcactggccccggcgtttttgccgctgtcgtattcctcacaggcacgccagcgcatcaggtccgccgcttcaatctcgatatgcgcctcggcaatcgggaactgcacgccctggttctgcccgatgggccggccaaacaccacacggtcgcgggcataggcgctggccttttcgataaaccagcggccgtcaccgatgcactcggcggcaatcagggtgcgctcggcattcaggccatcgaggatgtatttgaagcccttgccctcctcgccaatcaggctgtccaggggcagctccaggttgtcgaagaacagctcgttggtctcgtggttgaccatattggcaatgggctgcacggtcaggccgttgccgatggcctggcgcaggtccaccaggaagatcgacatgccttcggattttttctgcacttgggccaagggcgtggtgcgtgccagcaggatcatcaggtcggaatgctgcacccgcgagatccagactttctggccgttgaccacgtatttgtcgccgcgcttgatcgccgtggtcttgatcttggtggtgtcggtgccggtagtgggttcggtgacggccatcgactgaaggcgcaattcaccactggcaagcttgggcaggtagaagcgtttttgcgcctcgctgccgtgacgcagcagggtgaacatgttgtacatctggccatgcacagtgcccgagttgccgccgcagcggttgacttcctcaaggatcaccgaggcttcggccaggcccaggccggaaccgccgtattcctcggggatcattgccgacagccaaccggcgtcggtcagcgccttgacgaaggcttcggggaagcccttttcttcatcgatcttgcgccagtaagcggcatcgaattcggcgcacaaggcacgcacgccgtcgcggatggcgttgagttcttcagtgtcgtgggcattcattaacggctctccgcctgttgttattgggttattcgaaatgcacctgagcgttttgcgccaggccttcagtgttgccagcccagaggtctgcgacgccggttgcggtgatgcgcccgccgacctcaaaaggctgtggcgcggtcagtgggcgcacaccgcgataggcaaagcggcgcagggtcgcttcggggtgcgcccggcagaacgcacgcaggctcaaggtggcgatcagcgggccatgcaccaccaggccggcatagccttcggtgcccgtgacataggggtagtcgtaatgaatgcggtggccgttgaacgtcacggcgctgtagcggaacagcaaggtcggcgtcggttcgaccgcctctgtccattcgccttgggccagcgcgtcgccgctgcccgccttgggtggcgtaggttcgcggtagacgatgtcctgctcctcgcggatggccaggcgaccgccctgggagtagtcatggcgcacggtgacgaataacagtgaaccggtgcgcccagttttttcttcgacctgggtgatggtggatacgcgcgtggccgcctcgccagcccgcagtgggtgcaaaaactcaaggcgcccaccggcccacatgcgattgcggttatcggccggaggcagaaatccgccgcgtgccgggtgaccgtcgctgcccagggccgattcgggcaacgggtcctggaaaaaacaccattgccacaacgcaggcaccgcgtcgccatcggcgggcacggcttcaccgaacgtggcggcgatacgcttgagcaggttatggctcaggtggtcgtgggcggtctcacttcggccgatccaatcagtagcgctcatcgggtgcaggtcctcaggcagtgggtgactgccgtggatcatgcaagggcctgcccgttctgagaatttgcatttcaataaaccagcgttcggttatgctgaacgcttacagccacaccgtgaaccaatgtgggagctggcttgcctgctcccacaggaaacctgttgtccgggagttttgcatgcacttcgatctcgccgacctgcgcctgttcatccatatcgccgaatcccccagccttacccagggcgccaagcgcgccttcctgtcgccggctgccgccagtgcgcggatcaaggccctggaaggccagctcgacacgcgcctgttgtaccgcgacagccggggcgtggagatcaccccggcaggcgagcggctgttgcaccatgcgcggttgatcatgcgccaggtggattacctcaaaagcgagttcacgcaatacggcgtggattcggccggacatatccgtatcttcgccaacaccacggctgtcaccgaatttttgccggaggttctggcgggctttctgtcacagcgccccggcgtcaccgtcgacctgcaggaacgcctgtcacgggacatagtgcgcggggtgctcgatggcaccagtgacatgggcatcatcgccggccccgtggaagcctccggcttgcaagtactgcatttcagcaccgatgaactggtgctgatggtgccggtcgggcatccgttggccgacctgccttcagtgacccttgagcagaccctggcgtatcagcacatcggcctgcatgaaggcagcacgctgttgagtttcctgcgcgaacacgtcgagcgcctgggtaagcaattgtcgctgcgtatccaggtctcgagcttcgaggcgatctgccggatggtcgannnnnnnnnnnnnnnnnnnnnnnnnnnnnnnnnnnnnnnngatgcgaagcgagccgctcttgatctgcttttgatcttgatcttaggcgccccgttaaaccacgctggccggaattcgacagggatttggggggtaaaccggcagggatgccggcggattacgggcacaccgagcccaagcgaggtgccgagtggtggggcaagagccctttggttactttgggctgggccggcattccggcttttccaaagtgacccgccgttggggcggaaccctaggtggccgttacctaaataacggatatgtacccggtccaactgtgttgactgttaggccgtcttcgcaggcaagccagctcccacattggatcgcagtgcctaagctaaatccttcggcggcggttgagctgggggatggcggtttggggtgcttctacacgcggggcctgcgccgctgttttcgcggccagttgcgccagtgtgggctggctgaacagggtgcgggcgtccacgtcaagcccggccttgcgcaggcgggcgacaaggttcactgccagtagggagtgcccgcccagttcaaagaagtggtcatggcgccctacccgttcgagtttcaacacctcggcccagatcccggccatcaggctttccacctcgcccactggcgcttcgtaggctcggctaagcacagcctccagccctggcgctggcagggccttgcggtcgagtttgccggcggggttgaggggcagtgcgtcgagttgcacgaaggcggccggcaccatgtattccggcaggtgttccagcgcatggtcacgcaaggcttgcaggctcggcgcctggccgcgcagggtgaagtaggccaccaggcgctcatcgcaaatcaatacggccacctcgtgcaacgccgggtgggtggccaggcatgcttcgatctcgcccagttccaggcgcacgccgcgcagtttgacttggaagtcgttgcgcccgaggaactcaagcgtgccgtcgggcaggtagcgcaccaggtcgccggttcgatacaggcggtcgccagccacgaaggggctgtcgataaaacgttcggcagtcagttgctccaggcccaggtagccacgggcaacgccgacgccgccgatgtgcaattggccgctgatgcccatgggcaccggcgcatcatgggcgtctagcacgtacagacgggtgttgttgatggggcggccaatcggcagttgcagggtgggcaccggcgcgccgggttcgagggtccaggcgctgctgtccaccgtggcttcggtggggccgtacacgttgtgcaaacgcaccctgggcaagcgcgcctgtacgccccgggccagggcggcggtgagttcaccgccgccgcacagcacatcggtgaggctggtgcacagggccgattcatccaggtcgagaaactgctgcaacatggcgggcacgaacttgatcacgctgatctgctgcgtgcgaatcacttgcgccaggtacgccggctcgcggtgcccatcgggccgcgccaacaccaggcgcatgccgttgctcaacggccagaacagctcccacactgaaccgtcgaagctgaacggtgcgcgctgcaacaaggcgccgccttcggcgttcgggcacaggtgcgagccccactgcagcagattgcccaggccgcgatgctcgatcatcacgcccttgggtgtgccggtggaacccgaggtgtacatcacgtaggcgaggttggcgacgctcaagccgggcacttgtgggttgtcgatcggtgcatggttccaggcgcagtggtcgaagtcgatcagcgggatcgagacatcgcccaccacgtcgcgggtggcggcctgtaccagcagcgccaccggctggctgtcggcaagcatgtaggccaggcgctcgcgtgggtaaccggggtcgaggggcacataggcgccgccggccttgagaatgcccagcaagcccaccaccagatccaaccctcgctctacgcacaatgccacccgcgcgtcgggctgtacgccgtgctcgcgcaagtggaaggccagttggttggcgcgttcgttgagctcgcggtaggtcaatgcctgctcatccgtctgcaccgcgatggcatcggggattcgccgcgcatgggcttcaaacagcgcttgcacggtcaacgtgtgcgggtggtcggtggcggtcgtgttgaagtccaccagcaatctgcgcagttcgctggcgggcaacactggcacctcgcgcaacggcattttcggcgtgttttccagtgcgtccgccaggccgttcagggtgacgtccaagtaatccaagacccgttcagcgccgactgcgcgtggcgtcttggccttgagccgcacgccactgcccaggtcgtccaccgtgagcatcaacgggtaactgaggatgtcttcactgctgagcaaggcaatgcccggcaccaggttcagctcggggtcggccgaggtgtgacggtagttgagcaggctgttgaatagcccggtcaccccactgcagcgctgggccaatgccagcgacgcctgttcatgggcgagcaaggcactcagttgcgcgtgggtgtcgtgcagcgcctgcgccacgttttgccctgccaggcgcaggcgcagcggcaaggtgttgatgaacatgcccaaggcccgctcggccccctcgccggcttgcaaacggccgagcagcacggtgccgaacaccacgtcttcgcggcccgcgacacggctgagcacctgagcccaggccaggtggaacaggctcgcagcactcaccccaagggctcgggcctggctgcgcaggcgtagattgagcgtgtcgctgagcgcacgctgcgcctcttcggtttcggcgcgattggcctggcgctcctgcaggccgaacgccaaggtcggctcatctacatccgccagacgctctcgaaagaacgcttcatgcgccgcctggcgcacggtcgaacgggcgtgcgccaccatattgcgataaggcacgggcgccggcagttgcgcctgttggcccagcaaatgggcgcgaatctcgtccaccagcagcgtggtcgacgtggcatcgttgaccagatgatgaaaacgcagcctggcgacccagcgctggtgctggggctcctcggcgtaatccagggccatcagcggcgcctggcgcaagtccagcggttgcgccggttcgcgcagcggttcaacccgcaactgcgcctggcgccacaccatctgcattggttgttcaagggcatcccacaccaggctggtacgcaaaatatcgtggcgattgatcacctgttgcaaggcactggcaaaggcctccagttgctcgcggtgcgcaaaactgaacagcgcctgttgctggtacgggtcgtgcgcgtcggtgaggtggtggtagagcaacccttcctgcaacggcgccagcgggtagaggtcctgcacattggcggcgccaccggggatgccggcgacgatgcggtcgaggctgggttgatcgagttcggccagggcgagcaagtccgtggtgatatgggtgcaaccggccgggattcgattggccggcaccgcctgttcgtgaccgccacacgccgccgccagcgccgccacggtgggctggccgaacagcacctgcacgtcggcgcgcaggccggcctcgcgcatacgctgcaccagctgcaccgccaacagcgaatgcccgcccagctcgaagaaatgatcgtggcgacccactggttgcacgtgcagcaactcggaccagatctgcgccagtgtggtttccacgccctcctgtggcgcttcgaagcgacgggtgataaaggcttcctgggtgggtgacggcaaggctcggcggtcgagcttgccgttggcggtgaggggcaacgcgtcgaggcgcacgtaagccgcgggcagcatgtagtccgccagcgtggcttgcaggtgggtgcgcagtgcttcgatttccacaggctgacgtggcacaaaccaggcccataattgcccgtcgcgaaactgcaccaccgcgtcctgaagcgccggatggctggccagggccgattcgatctcccccagttcgatgcgcacgccccggatttttacctgatcgtcgttgcgccccaggtagtcgagagtgccgtctggcagccagcgcgccaggtcgccggtgcggtacatccgaccaccgctgaaagggtcgtcgagaaaacgttcggcactgagttccggacggttcaggtacccccgcgccacacccttgccgccgacatacaactcccccgccacgccaatcggcacctgacgttgttgcgcgtccagcaggtagacccgggcattggcgaccggcgcgccgatatgcaacggctggcccacctcgacacgccccgaggtcgccaccaccgtggcttcggtgggaccatagttgttcaccaccgcaaacgtctgcgcctgggtgaaggtgcgcaggcggtcgccgccgatcagcaaggtgcgcaaggtgggatgccccagcccctggctgaacgcatattcggccacaggcgtgggcaggaagcacacatccaacggttgcgagcgccaccagccgagcaacgcgtcgatatcttccgcgccctcctgagccggtggcaggtgcaaggtcgcgcccacgcacaacgccggccagacctcccaggccatggcatcaaaaccgaagcctgcgacgctggcggtgtggctgcccgcgtgcaggtcgaacgcctggcaatgccagtccaccaggttcgacacgctgtgatgttcaaccatcacgcccttgggcaagccggtggaacccgaggtgtaaatcacataggccaggttcgacggcgtgaccgcaacctgagggttgctgtcgatggacgcattgccaggctccagcgcgatcaccggtaccgtcgagacgggcagacgctggcgtaaatcgtgctgggtcaggatggccacgggcgcgctgtcgtgcagcaggtactccaggcgttcggcgggatgggccgggtccagcggcacgtagcaggcgccggatttgaggatcgccaacagccccgccagggtgtcaaggccacgtcgggccaggatcgcaacgcggtcatcgggctgtacgccgagcgccactaattggtgggccagcgtattggcctggcggttgagttgggtgtagctcagtgcgcggtcctgatacaccgccgcaatagcgtggggcgtacgtgcggcctgggcttcaatgcgctgatgcagggtttgcggcgtggcgttgggctgcgcggtggcgttccagtgctgcaatcgggcctgctcctggggcaacagcatggaaaactcagcgatgggcagcgcagtatcttccagcccctgttccagcagcccgatgaagcgctgggccaatgcctgcacgtcgcccgcctggaaatacgcctcgttgtagacgcaatgcagccaggcattgtcctggtaacgatggctgcgcaggtgaatggcgagcggtagcgcttcatgctgattggaaaccttgatcgcgcgggcctggacctgaccgaagcgcagatcgtggtcgtcctgctcgaacgataccgacacgtcaaagagttgcccgcgatccgttcggcgcaggcccagctcgcggttcatctcactcaacgggaagcgctgatgacgaaagtcctgcttgagctgatcacggatgccacgcaccagggcaccgaaagacacgccctcgctgaacgcaaaacgtaccgcgctgacctgggtgaacaggcccacagtggcgcgaaaacgcgcgttggagcggttgagaatcggcagccccaccgcccattcctggcgttggctggtgcgggtgaaatacacatacatcgccgccagcaacacatgaaaggccgacgcctggtagtggttggcaacctgctccatgcggctctgcaacggcaccgggaagccttgcacccaggtgttgctcgacgtcttggcgttgtgcctgggggtgagcagtggttcgggcagcacctggtatttgcccagccaatagtcgcggtcgcgggcgtagcgggccgattgcaggtagcgctggtcggtgtcgataaagtcgatgtaggacggcgccagcagctcagtgtcgcgcccctgctccagggcgctgtagagctgcgcgagggattgcagcatctggccgaagccccagccgtcgaggatcaggtgatgagcctgggtgccgaggcggtagtgatcatggtcaagtttgaccaggaaaaaccggcacagtggttcgccgctcagggcgtagggccgggccatttgcgcctgcatcaaggcttgggttgccgccgatgggtcgggcagcgcggagaaatcatgcagcgccatctccaccctcaactcaggggcgaatgtttgcccaggcaggccattggcgtcggtatgcagttgagtgcgtagcgcatcgtgacgggccaccagcagtgcgacggcacggcgcatgcgttcgggctcgacggtgccggcaaaatccaggtagccgccaatgttgtacagcggcgagtcgcccacgcgcagttggtcgagccaaatgtcttgttgggggccagtgagggggaagcgggccggcaggctggaggaatgctgcataagatccttctcatgggggtcaggcactggccgcgcagaggtggcccattacaccgatgtggccggatttgagcatgggcgccggggggtgtctgacacccgaaacccggacattcaaatggatggataggccttggtggaaggttcatggctgaaacgattaaagcgttgtaggagattggctacatcggatccatcccgagtctcttagcaacctctttattttataaattcattatttacatcaataagttaaccaaggctaaaaataacttacgcctgtacgtagccggcttaattcaagagaaacgtcggtttaatggcgcaatttttatggcagcttgtgtccctcgtttccgctacatacgtaggacaaatccctatggctaaataacatctcgaacgccgagttacgttcaagcagtacggagcgccctgcgcaggccctgggcaaccgttgacggttttcgacatcaaggatgagatggctatgagtctgacctcaagtattggcgacacatgcggcccgcttttttatgccgaaatgggcgagttgatttcaaacagcggcgacgaacatttcgccgccaccatgctgcagctggtgggcaagtgggtaccgattcacctggtggacctcagcgagtggaccctggatgaactgcgcgaccgcgtgctggacatcaagctactgggcagcgccggggtgaagaaggatttgtctgtgccccagaccctgcatgcgctgaacgaccacccgttgttgcggcagatgctgcacatgcaagatccgctgctgatccagatgaacgccaaggccaacagcacgcacccgcgcggcacctcgcaccagtgcaacctggtatcgcgccagggcaaccggcgctgtgtgatttcgttctaccgcctgccgacccagcaggggttttccctggctgagttgtcgtttctcaagtgcctgtcggacacgctgttgccgttgatggagcggcacgcccagtgcctgcgccaggcgccgcatgccgagacagagcccgcccatactctgctggaacaatcgcagttgcagcgcgagttctacaagcgcttgtctttgagcgacatcaccctttcggcgcgggaacaggaagtgtgcctgggcctgctgaccggcggcaccgtgccgcaaatcgcacagaaactcagcgtcaaaaacagctcgatcgagacctacctcaagcgcgccgccgccaagctgggcgtgagcggccgacatggcctggccaaatggatggtgggcgcctgatgaataaacagacgctgtgcaccctcggcatggcctggatgctcggcggttgctcgctgatccccgagtaccagcagccagcggcgccgacgcctgcgcagtacccccaaggcggcgtctaccgcctggcgcaggccggcaacatggcgcagaacccggactggcagcagctgttccacgacccggcgctgcaacagttgattaatgatgcgctggtcaacaaccgcgacctgcgggtggcagccctgaatgtgcaggcgttccaggcgcagtaccgtatccagcgcgcggatttgttcccagcgatctccgccaccggcgccggcaagcgccagaagttgccagggagcgtgaccggcaccggcaagtcagcgatcacctccaactattccgccaccttggggctgagcgcctatgagctggatttgttcggccgcgtgcgcagcctcagcgaacaggcgctgcttacttacctgggcagcgaacaagcgcggcgcagcgcgcaattgagcctggtggccaacgtcgccaatgcctacctgacctggcgggccgaccaagaactgctggccctggccgagcaaaccctggcggccaacgaccacagctggcaattgacccgccgcagtaaaagcgcaggcaaagcctcggcgctggacgtggtgcaagcgcgcacagcggtggaaagtactcgcgccagcgtggcccgctatgagcgccaagtggcccaggacctcaacaacctcatgttgctggtgggtggcccagtggatgaacacttgcccgcgcgcccgctggccgatgacctggtcgcccgcgtgcccgccggtttgccctcggacctgctgcaacgccgcccggatatcctccaggccgaataccagctgcaggcggccaacgccaatatcggtgcggcccgtgctgcgttctttccttcagtgaccctcacggcaaacgcgggcagcaccagcacagagctgtcggggctgttcaagggtggctcgggcagttggacattccaaccgcagatcaacctgccgatcttcaacgccggcagcctgcgtgccagcctggattacgccaagctgcaaaaagacatcaccgtggcccagtacgaaaaatccatccaggctgccttccaggaagtagccgacggcctcgccgcacgccagaccttcaacgaccaactggcggcgcaacgggatttcgtcgaggccaaccagacctattacaacctggcccagcaccgttaccgcagcggcgtggacagcaacctgacgttcctcgatgcgcagcgttcactgttcagcgcacaacaggcgctgattgtggaccggctggcgcagttggtcgccgaggtgaacctgtatacggcgctgggtggcgcgtggacgcaatggccgaacctggcggccgcgcgttagagcaacttgagtccagactcggcatgacgatttgggtcgcggctatccagtggctgtttgtgcccataactgtccacgaagccgcccacagcggccatcgaatggaacccgctgttgaccgtgccgatggcgccgttgaggaagtcctggagggttgcgggcgcaacgaagtctttcaagcccaggcgacgcaacgcttgccccggatactcaccatcattgaggctgcgcatggcggcggcaaagctcttattggcctccccatcattattttcaaggtaggctcgcttggcactgacagcgtataaaaactgcgcattgaccagaacatcgttgggcctgtcggtgccgaagtgggcgccggccttggcctgcttcagttcgtcatcggtgatgtgcagtttgaacccatcgcgcatgacaatgcgatagccgctatcggtggcctcaatggttttgtaaataccgtaagggttatggccgaacctcatcatcgcggctttaatcgcggatatcgtcacgcaattaccttcggccaattggtaaaagtctttgaaaatatcaccgggcttgatgcccgtgttcgcaggcgtacctttcaagaattcgtcacgtttgccgttgcgtttatcggggaccggcgcaggcaaaggtgttgaatcgacttcaggttttaaccgcgcagataacaccgtcaacaagcgctccaattcgccgaccaggcgactgagttgttcagaagttccagttggggcagaggcgttggcgaagggcaaaacacgtggcgaagtgacggcgtcgcttgccctggcatgaccaaaagcagcagtgttaacagaagacactaacatgttgaataatccctattattcactaaatactttaaatcacccgcgaagcgtgaccaccttcaatgacggtgaaaccggcgtgttatataactgcccctccatcacgccctcaataattacaccgttcttgtttcgtgcgcccttgtccaacggcacgccgacctgcgtgcccaatgcactggcatcgatgacctgcagatgttctttaagccccagataggacagcgccgtatcaccgtcgatgccgcctccggcccccgacagcacaccgggataagtgcgatgggcgtggtacgcactgtctttgccgtacaggctcatgaaggggtccgttgcgctgtcgcgctcaagctccaggtattgacgcttgctcatcacagcaaacagaaattgcgcatccttgaccatgccttcatcgccgccactgaactttgccgccttggccgccagttcaagttcttcaacggttattgtcagcttgaagccgtctcgcatcgtcacgtcatagtggtcaccatgtttggcgacgtgcttgaaaatcccggctgggctttgcccgaacgtggccatagcaaccttgatcgcggccacgtgctcctctcggcccagagcacccagataaggaaagttctcatacgtggcacgcaacccattgtgcagatcgtcaggcttttgacctttgggtttttcagacataaacgcagtgattggctcatagtttttatctgagaacatctcaataagttcggtatcaaacgcgttacgggtactggccaggttcgaccggttcatgaacggtgccaattgttctttccactcacccctgatggtgggaacgctgtccggtgcaggcacggtattaaccagcggcctgtgcggtgaactcacaagtggggttgggtaagccgtaacgggtggctgtggtttcggcgcctcatgctccctgctcatccaggttttaagtgacaccactaatgtacccaacaacttcaacagctcccccagctctgcgtcccggtttgagttgacacttgggccaatcggagaatgtgccggtaatttaccaaagtgattgggttgatctgtcactgcctgatcaagggttttaccaggcgatgtaaaccttgagtgcgcgggcgaataagcaggctgagtgtgcgtgagcatggtagggcgtctcatttgatcgaagggggataatcgcgaacggtctggcactacttgcccactgccactgccgaacccggcactgaacaagtactcttgcgtggccaggcggggggaaaggttccggctcgacaggtaacaacatccttctcgcttaacggaccactatcagccaattcctcaacgttgcgttttttgtccgaccccttatcagcgcatccccgcctgccgtatccgatactcccccggcgtcatctgcgcataccgcaagaaaaaccggctgaaatacgccgggtccttgaaccccagctggtagcagatttcatttgccgaactgccggtaaacaacagcaggcgcttggcctcctgcatcagccgctccaggatcaggcgcttggagggcaggtcggcaatgcgccggcacacttcattgagccgcgcctgggtcacgccaatactttcggcataacgcgccaacggccaatgttccaggtagtgggcttcgatcagctcgttgaaacgatggaagatgcgcaggtcttcatgggcggtcgggcgtgccggctgggcgtgggcgcacaggcgcagcaggcggatcatgatcagccttgtgaggctgtcgagggcggcggcgcgccctgcccgttcggtgttgatttcactgcacagcgcctcgaagagttgctccagcccctcggcgtcgccattcaaggcgacacaggctgcaccggaggcaaggctgggatcggcgtcgatcaaactccacaccagctgctggcgcaccgtcaatacatgcccatcggcatccgcttcggtgacaaaagcgtgggccaccgtgggcggcgtgagaaaaaacatcggccccgattcaacgtactggcggtcatccagatacacccgcaccgcgccactcttgacgtaatgcacctggaaaaaccggtcatggcgatgcaccgccatattgcgcccgaaaaaacccgccaggttgccgagcttgtcgtaatgcacctcggcgtcgctgtagcgctggtcgtagacctgcccgatgttgatgttggggatcggcttcacggggctctcttcttgttgttgtgaggccagtgcagtgtgccacgcttgacggtagttaacatattaattataaagttaacaacttaacgaactgcctatgcagccgtcgtcaccgccaggagaaacgcatgagccgtaccctgcatgatgttgccagcggcaccctgttcggcgttgcgctgaactaccagggcctgctggaccagcatctcgccgccttccagcaggcgccctaccagcagccgccgaccaaaccggtgctgtttatcaagacgcccaacacccgcaatgcccatcgcggcgtagtgctgcagcctgcgggcgagcgcctgcaaccgggcccggcgctgggcgtggtgatcggccagcgcgccagccgtgtcagcctggagaacgccatggcccatgtggccgggtatgtggtggtgaatgaattcagcctgccggaagacagctactaccgccccgccgtcaaagccaaatgccgcgatggtttttgcgccctgggcccgcagctggttgcgcgggatcaagtcgccaaccccaaccaactgagcctcaagctgttcgtcaatggtgagctgcgccaagaaagctccaccgccgattgggtacgggacattccgcaattgatcgccgagatcagcgagttcatgaccctgcatcccggcgacgtgctgatcaccggcaccccgcaaggccgcgtggatgtacagccaggcgatcaggtcgaggtcgacatcaccggcattggccgcctgagcaacaccattgcagcagaggcatcggcatgaaacgcgcacgtatccaatttgaaggtaccgtccacaatgtgctggtggaggccgattgcagcgcgcgcctggacgatggccgcctgctcaccgaagaccaggtgcaatggctgccacccgccaccggcaacattttcgccctgggtttgaactacgccgaccacgccgccgaactggcctttacgccgccgaccgagccgctggcctttatcaaatcggtgggcacctacaccggccaccgccaagttacctggcgcccggacaacgtcgcctacatgcactacgagtgcgagctggtggcggtgatcggcaagaccgcgcgcaacgtcaaacgcgccgacgccctggactacctggccggttacacggtgtgcaacgactatgcgatccgcgactacctcgagaactactaccgccccaacctgcgcgtgaaaaaccgtgacgccaccaccccggtcggcccatggatcgtcgacgtggccgatgtgcccgacccaggcaacctgaagctgcgcacctggatcaacggcgaactgcgccaggaaggcagcacgaaagacatgattttcgatatcccctacctcatcgaatacctgtccagcttcatgaccctgcaaccgggcgacatgatcgccaccggcacgcccgagggcctggccgatgtggtgccgggcgatgaagtggtggtggaagtcgaaggtgtgggccgcctggttaaccgtattgtcagtgaaacggagtttttctccgcgcgcaaagaggcttgagcaccatgatcaaacactggatcaacggccgtgaggtcgaaagcaaagacacctttatcaactacaacccggccaccggcgaggccatcggcgaagtggccagcggcggtgccgaagaagtcgcgcaggccgtggcggcggccaaggcggcgtttcccaagtgggccaatacaccagccaaggagcgcgcacgcttgatgcgcaaactgggcgagttgatcgaacagaacgtgccccacctggccgagctggaaaccctggacaccggcctgccgatccaccagaccaagaacgtgttgattccgcgtgcctcgcacaattttgatttcttcgcggaagtctgcacgcgcatggacggccacacctacccggtggacgaccagatgctcaactacaccctgtaccagccagtgggcgtgtgcgggctggtgtcgccctggaacgtgccgttcatgacggccacctggaagaccgcgccgtgcctggcgctgggcaatacggcggtgctgaagatgtcggaactgtcgccgctgaccgccaatgaactggggcgcctggcggtggaagccgggatccccaacggcgtgctcaatgtgatccagggctacggcgccaccgcgggcgatgccctggtgcgccacccggacgtgcgggcgatttcctttaccgggggcaccgccaccggcaagaaaatcatgcagaccgccggcctgaaaaagtactccatggaactgggcggcaagtcgccggtgctgatttttgaagacgccgatctggaacgcgccctcgacgcagcactcttcacgatcttctccctcaacggcgagcgttgcaccgctggcagccggatctttatccaggaaagcgtctacccacaatttgtcgccgagttcgcggcgcgggccaagcgcctgatcgtcggcgacccccaggaccccaagactcaggtcggctcgatgatcacccaggcccattacgacaaggtcaccggctatatcaagatcggtctggaggaaggcgccacgctgctggctggcggcctggaacgtccggcgaacttgccggcgcacctgagccgcggccagtttatccagccgacggtgtttgccgacgtgaacaaccggatgcgcatcgcccaggaagaaatcttcggcccggtggtgtgcctgattccgttcaaggatgaagccgaggcgctgcaactggccaacgacaccgaatacgggctggcctcctacatctggacccaggacatcggcaaggcccaccgcctggcgcgcggtatcgaagcgggcatggtatttatcaatagccagaatgtacgggatttgcgccagccgttcggcggggtcaaaggctcgggcaccgggcgtgaaggtgggcagtacagcttcgaagtgtttgccgagatcaagaacgtgtgtatttccatgggtagtcatcacattccgcgctggggcgtgtagcccaggctcaaacaagcctcctgtgggagccgggcttgcccgcgatgcagacaccgcggtcctttagccgtaccgagtcgatgccatcgcaggcaagccagctcccacagggacctcacaggccatacaagaataattattcaggagagtcatcatgggcgaagtggttctggcagcgaagatctgccacgtaccgtcgatgtacctgtcggaactgcccggcaagcatcacggctgtcgcgaagcggcgattgccgggcacaaggaaatcggccggcgtgcccgcgaactgggggccgacacggcagtggtgttcgacgtgcactggctggtcaacagcggttatcacgtcaattgcggtgaacagttccagggcacctacaccagcaacgagctgccgcacttcatcaagaacatggactacgcctaccccggctgccccgaactgggggagctgatcgccgccgaagccaacctggccggcgtgcgcagcatggcccataacatcccgagcctggagctggaatacggcaccctggtgcccatgcgctacatgcacatgggggtgcccgacgcagagaaattcaaggtgatttccatcgctgcctggtgcgcctggcatcgcctggaagacagttttgccttcggcgccgccgtgcgccgggcgattgaaaagagcgaccgcaaggtgctggtgctggcgtcgggctcgctgtcccatcggttctcggacgaccgcgaggctgaggcgaatatccacaactggacccgcgaattcgacaagcaggtggacctgcatgtcgtggaaatgtggaagcaaggtcgcttcaaagagttctgcgccatgttgcccgactacgccgaacactgttttggcgaaggcaagatgcacgacaccgccatgctcctgggcctgctgggtgggccggactatgccaagccggctgagatcatcacgccgccgttcggcagttcgggcaccggccagatcaacgcgattttcccgctttaaccctgggagagccccatgccgcactttatcgctgaatacaccgacaacctcgaacagcaggccgacttgcccggtctgtttgaaaaaatccaccgcgtgctgggcgacagcggtgtgtttccgctgggcggcattcgcagtcgcggcgtacgcctggacacctggcgcatggccgacggcaagcacgactatgcctttgtgcacatgaccctcaaggtcggccacggccgcgacctggcaacccgcgaggccgtcgcccaagcagtgttcgcggtgattaccgagcacttcgccgagctgcaggcgcagcgcttgctcgcgctgtcgttcgagatgatcgagctgcacccgcagctcaacttcaagcagaacaatgtgcacgcgttcctgaacaacccggcaagctgaaacggccccgcccccccctgtaggagcgagcttgctcgcgaaaagcccacaggcaccgcggacccaacagcgctgcgttttcgttgacgtttttcgcgagcaagctcgctcctacaacaacaaaaagaacaccaccatgagcacagcccattccactgcaagcctgcagcttgccgagcacgaccgcacccatcgtttggtgacttggcgcctgatgcccttgttgctggtgtgttacctgttcgcccatctggaccgcatcaacatcggctttgccaagatgcagatgagcagcgacctgcacttcagcgacaccgtgtacggcttcggcgccgggctgttcttcatcgcctacgcgttgttcggcgtgcccagcaacattgccctggaccgcgtcgggccacggcgctggatcgcctgcctgatggtggtgtggggcctgctctccaccggcatgctgtgggtggagagcgcgcgcgggttctacgtgctgcgctttctactgggggtggccgaggccgggtttttccccgggattctggtgtttctcaaccgctggtacccggcacgccgtcgcgcccaggtcaccgccttgtttgccattgcggtgcccatggccggggtgttgggcgggccgatttccggggcgatcctggagaacttccatgatgtcggcagcctgcgcggctggcagtggatgttcctgatcgaaggcgcgcccgtggtgctgctgggactggtggtgctcaagtggttgccggacagtttcgagtcggtgcactggctgactgccgagcaaaaacagcaactgcgcacccaattgagcaacgaggaacagcgcaagaccatcacctcgttcggcggcatcctgcgagacccgcaggtgtggctgctggtggctgtgtactttgcggtgatgctggcggtcaacaccctggcgttctggatgcccaccctgatccacggcgccggcatcggccgtgacagccaggtcggcttgctcagcgccgtgccgtacctggccggctgcttcttcatgctcggctgcgggcgctcgtccgaccgccaccgcgagcgccgctggcacctgtgtgtgcccctgctgatggcggcgctcggtatcgccgtggcgggcctggcgcccggcaatgcgttgctggtgatgagcgggctggtggttgccgggatgggcgcaagcgccgcgctgccgatgttctggcaactgccaccggcgtttctttcccacaccacccaggcggcgggcatcgccatgatcagctcgttcggcagtatcgcggcgttcctcgcgccgtacctgatcggctggatgcgcgacgccacccagagcgccagcctggccctgtacgtactcgccctgtttatcgccctcggtggcttgctggtgctgcgcacccaggccgccatcgtcaacccacactagagaccgttgccatgctcgactcccagcaaatcctcgcggccgccgcaaaccttgaccgcgccgaacgcagccgcgaacaggtgcgccagttttccctcgactaccccggcatgacgatcgaggacgcctacgccattcagcgtgaatgggtcgcgcaaaagatcaaggccgggcgcacgctcaagggccacaagatcggcctgacctcacgggccatgcaggtgtcgtcgaatatcaccgaacccgattacggcgccctgctcgacgacatgtttttcgacgaaggcagcgacatccccttcgagcgtttcatcgtgccacgggtggaagtggaactggccttcatcctcggcaaaccgctcaaagggcccaactgcacggtgttcgatgtgctcgacgccaccgaatgggtgatcccggcgctggaaatcatcgacgcccgcatccagcaagtcgacccccacaccaacgccacccgcaaggtgttcgacaccatctccgacaacgccgccaacgccggtgtggtgctcggcggccgcgccgtgcgccccaccgagatcgacctgcgcaaggtgccggcggtgttgtatcgcaatggcgtgatcgaagagtccggggtgtcggcggcggtgctcaaccacccggccaagggcgtggcgtggctggctaacaagctggcgccctatgacgtcaccctgctgcccggccaggtgattctcggcggctcgtttacccgccccgtggcagcccgccctggcgataccttccacgtcgactacgacctgctcggctcgattgcctgccgcttcgtctgaacccaggaggactgtcatggacatgcctgtcaaccgcttcaagcaacgcctgcacaaccgcgaggtacagattggcctgtggctcggccttgccaacgcctactgcgcggagctggccgccaacgccggtttcgactggctgttgatcgacggcgaacatgcgcccaaccaactgggggacatgctcgcgcagttacaggccattgcgccctaccccagccaggcgttgattcgcccggtgatcggcgacacggccctgatcaagcaactgctggatatcggcgcgcagacgctgctggtgcccatggtcgaaaacgccgcccaggcccgggaactggtgcgggccctgcgctacccgccccagggtattcgcggggtcggcagcgccctggcccgcgcctcgcgctggaacagcatcgccgattacctcgaccaggccgacgcgcagatgtgcctgctggtgcagattgagaatgccgagggcctggccaatctggacgccattgctgccgtcgaaggcgtggacggtgtgtttatcggcccggcagacttaagcgcgtccatgggccaccgtggcaatccggggcatcccgaggtacaagcggcgattgaggacgccatcgtgcgtatcgtcaaggcgggtaaggcggcagggattctcagtgcggatgaaaatctcgcacgacgctatatcgagttgggggcgacgttcgtggcggtaggagtggataccacggtgttgatgcgggggctgcaaagcctggccgggaagttcaaagacatacctgtggctgccaataccggtggcgtctactgagactcaatgtgggagctggcttgcctgcgatagcggtgcatcagcgacaaataagccagctgacccggcgctatcgcaggcaagccagctcccacagttgatcggtggtggttcagcaattgagtcagcgcttgatgttcttcaagtcatccagcaaccccaacaaggtctggaatttctctgcgcccaactgatcctgcaagcgctgatagttggcctccatgcactggctcatggactcgaaactcgccttgcccttgtccgccagggtaatcagcacccggcgctggtcctgttcggccttgcgccggtgcaccatgccggccgcttccatgcgcaccagcacgccggtcatgctcggcttgaggatgcaggccagttcagccagttgatagatctccaactcaccgtgctgttcaaggatgcggatgatgcgccattgctgttcggtcaggccgtgttcattcagggaaggacggaaaaaactcatcgcggcctcgcgcgcttgcagcaaggccagggtcagggattgtcgaggtgtagacatagggctcagggtcacgaagtatttagttaatagtttaacgaaactctaacattcccggccggcgagcgcgctataacttataggtgccctcgcccgtggcgcgctgaatcaaaaacccgggcacgcaggatcaagacttccagcccgccaagggccctaatggaggcatccgctttagcgccttccttcactttttcaggctgcgccatgatcaacatcgaaacccccacgtactacaccgccaccaagaaatacaacctcagcttccccaccctggaacaggatatcgacgcggacgtcgtggtcatcggcggcggcttttccggaatcaacacggcccttgagctggcggaaaaaggcatcaccaacattgtcgtgctcgaagcgcgctacctgggctttggcggcacgggccgcaacggtgggcagatcatggcaggcatcggccatgacctggagaagatcaagaaggacgtgggcgaagacggcctgcgccaagtgttcgagatcagcgacctgggcgccgacatcatcaagaaccgcatcgccaagtacaacatcgacgcagacttttgccacggctacggctacatgggcttcaacgcccgccaggaaaaaaccctgcgcgcctgggagaaagacttcaagtcgatcaacagccagcacgaaatccgctttcttggcggctctgacgtgcagcagatcatcggctccaccgcctacaccagcgccctgctgcacatgggtggcgggcatgtgcattcactgaacctgctgctgggcgaagccaccgcgctggtcagccatggtgtgaagatcttcgagaacagcccggccctggaagtcagctacggcgagcgcatcaccgtgcgcaccggtcgcggttcggtacgcgccagcaagttgctgtgggcctgtgacagcttcctcaacaagctggagccggaactgcaccgctcgaccatcaacacctacgcgttccagatgatgaccgagccgttgtccgaggagttgatccagcgcatcagcccgatccgtggggcctacagcgatatccgcccggtgatcgactactaccgcgtgaccaacgaaaaccgcctgctgttcggcgccgccacgcctttggtggagcacattcccggcgatctgaaagcctggaaccgccaactgatgctgaagatttttccctacctcaaggacgtgaaaatcgacctggcctggggcggcccgatggcgtgcagcccgaacctgttcccgcaggtgggcactttgccggggcgcagcaatgcgtttttcgtgcagggctattccggctttggcgtcacccccagccacatcatctgcaaggtgctggccgaaggcatgagcgagggctcggcgcgctatgacctggtcagctcgatctcccgccccaccatcctcggcaaggacgcgattcgccccctgctgctgacggcgggcaaatcctggcaccaattatccggctactggaacggtcgccgctaacccctgtaggagcgggcttacccgcgaagaacgtcaacgataacgcgggccttcaggtaaatcgcggtgcccagacgttcttcgcgagcaagctcgctcctacaaaaatctcgtacttatcggagcatctgccatgacacttaccaccctcaaacacaacgtccagctgtcggaactcgacgcctggggcaccgtggccgacctcggctcgcaaatcctcgaaggcgaagtacgcgccttcggcaagatgactttcggcgcgcccaccgatgcggtcagcagtgcgtacttcggcaccacccagggcaagttccgcatggtctacccgttcgccgaacaggccacgatagtcaccggcgaagtggtgctgaccgacgagtccaccggccaatccacccgctacaaggccggtgacagctggttcgtgaccaagggcacgcccgtgctgtgggaagtggtcagcgagagtttcgtcaaacactacttcgccgtcgtgtaagggaggggttgccatgtcgaattcatctgactggatcaccgtaggcgccctggctgaggggtttgcacccgaggcgttcattctgccgaatctggccgacctggccggccagaccttcactctgcactttgccaatggctggcagatcgaacaccgcttcgaacaggagcgcctggcctggcacgccgccgatggccactccagcggcagcgctgcctaccgcgccagctcgattcgtccgggcctgtacctggtggactttatcaagcatgaggccgggcaaagctggtcgatcagcctggtgctggacacgccaaatgcctcctttaccgccgtgattggccgtatgccagaaccggcagagacccacgaaggcctgtaccaccgcgccctggccggcaaaccgctgacctcggtacaggttgacttcctccacggcagcctcgaccggccctggcaggatggccactgcctgcacgcccccaccgacgagttggtcggcctgcgcaaccactatcgctacagccccagcgaggtctacgaacacatctacctcaacccgcggttctacgcctggcaatgccttgagggcgtggagaaaggcctgtgcgacaccgaccgctgccattactacaagatcgccgaacagctgtacctgttcgtctggcaggagaagatcgtgccgaccctcggcctggtattgatcgacctgcaacagcaccgcagcgacggcaagatcttcggctatgccggggcgtccttcgacgcgctgtcgaacttcccgatcagttcctattgccaggtgctcaaccacacggagtacccccgtgactgagccgcgcacggtggtgatcaccggagccggcaccggcatcggcgccgcctgcgcacgcttgtacgcacaggaaggcgcgcatctggtgctgatcggtcggcgtcgtgagccgctggaacaggtggcgcaggacaccggcgggctgatcctggtgggcgatgccgcctgcccggacacctgggacggtttcatccaacaaatccgcacccactgcgggcgcctcgatgtgctgctggcctgtgccggtggccacggcctgggcagcgcgacccagaccagcccggccacctgggaaggcgcgctgcgcagcaacctcgacagtgcgttctacagcgctcgcgcctgcctgccgctgctgcaggaaagcgccgggaacatggtgctgattggctccatcgcctcattggcagcaggccccgaggtgtgtggctacaccaccgccaagcatgcgctgctcgggctcaaccgctcgctggcccgtgactatgggccccatggcgtgcgggtgaacgcggtgtgcccaggctgggtgcacacgccgatggccgacgcggagatgcagccgttaatggaggcgtacggcgagaccttgcagcaggcctatgcgcgcgtgtgtgccgatgtaccgctgcggcgcgccgcccgtgccgacgagatcgccaaggtgtgccgcttcctggccagcgacgacgcctcgatcattaccggcgccacgttggtggcggacggtgggtccagcatcgtcgacgtgccgacgctggcgttcacgcgcctggagcctgcccatgccccatgacctggatttcagcggccaagtcgtgctggtcaccggcggtgcccaaggcattggcctgggcatcgtccaggcctttgccgaacgcggtgcgcgagtggtgattgccgaccgtctgcttgaacaggctgaagccctggctgccgggttacgcacgcaagggcatcaggttgacgccgttggcgttgacctggcggataccgaagcggtgtttgcttgcgtccaaggcttggcgcaactggatgtgctggtgcacaacgccgggtactttccgctgaccgcctttgccgacatcaccccagcgattctggagcgcaccctggcggtgaacctgtcggcgctgttctggctgacccaggcggcgttgccgaggtttcgcgagcaaggccggggctgcgtgctggtgacgtcttcggtcaccggcaatcgggtcggttatccggggctgagccactatgcggcgtccaaagctggggtgaatgggtttatccgcaatgcagcgctggagctggcgccgttgaatgtgcgggtcaacggcgtggagcccggcatgatcgccacgccggcgatgggcaacctgggcgatgcggccgtgaatgacagcatcgcccgccgtgtgccgctggggcgcctgggcgcggcggcggatattgccggggcgatggtgtttctggcctctgacctggcgggctatatcaccgggcagacgctggtggtggacggtggcgcgacgctgcccgaaatctgaaacccgatcgttcccacgctctgcgtgggaatgcatcctgtgacgctccgcgtcacgacttctggagcgggacgcggagcgtccggggcggcggtcccacgcggagcgtgggaacgatcacgcttacaccgcctgcaaccggctggaacgaaaatccttgggcgatacctcaaactgcttcttgaacgagcggctgaagtgcgccgagtcggtaaaaccccacttgtaggcaatcgaggtgatcgactcactgcgcaggaacgggttggtcaagtcatccgcactgcgcttgagccgcgcgcgctggatgtagcggcagacgctgtcgtcctgttcttcaaacagacggtacaggtgccgcaccgagatattcaggcggttggccaggccgatcgggctcaggcctggctggctcagcgactcatcaatgaccttttgcacatagctgcgtaggttattgccctgtaacgaggccacgccttcgcggcactcatcgccctgctccaacgccgaacccaacagcgagacgaacgccgcttgcagcgcttccacttgcgtggcgtcttcgtcggtatcgtccttgcacaattggtccatcagcacatgcagcatgcgcccacaggctttggtcgaggagatcttgccgaaggcccgtgcctggccacccaggtgcttgcacaccgcagtgcgcggcaaggacagcgaggcgtgttcgatcaggccgaagggggtaatttcgatggcgcccaccgagtccatcaacagcatttcgccgggggccagttgtacggtctggtcgttctgggtgatttgcgaatagccgctgcgctggctgaccaggaaacattcctggtcgttgtcatggtcggcgtggtgcatcgggcgcttgatcagcccggcattggtgcgcaggatggccaggccacgcgacaggttgtggatctcgccgataaacagcgaacggttgaaagccagctcggtatcgaagtggccgcacgcggcgcgcagttcgcggttccagctgtcgagcccgtcgggtgcatgctgtgggatgctcatggggtgtctccgcagtggcgttattcttgttgttctggtgcaatagttaacatgttatctatatgcacgcaacaacaaacctgtttgcccgttgcagaagcactaatggtgccaatcagagacccgacagtacccgccgcaacccggccagggttgccaagagatgcacgcgttgctcggcgctcaacgcaatgtagcgccggaacgccggcatgcggttgaccacctcgctgccacccatatgctccaggcgcacgcaccattgctggtcgtgcagctcgatgcgcaggcgcttgaaatccagcggcatcaacgcctggaacaacacgctgtccgcctgtaaacgcgcctgcaattcacggcccagtgcctggttgccggcgcggcgccgcacatgaatgccgctgcgccggatcgcgccgccatggtgcacctcgaagctgccagcgccacccgctgcagcaggaacgcgcaggacacattcggtcagcaccaggtgcatcaacaactgcgactcggtgcgctcgacaatctcaaaggccacaccgtccacttcaagggtggccaggcccagatcacgccgcagatgagccagggtcacccccggtcgatacccgctgggtgcgcggtcggcacgaaacagctcaaacagtttttgccgcaaagtcgttataaccgtcatgggcaacccccggttcatggctgaattccttggccaacacctcctctacgcaggcgggcttgaaggggttgaccttctgcaccaccagggtccagaacagcgcgtaggtggccgtcacgccgagcatcacgccaaacggcacgtagatgtccgccgggttcatgccgggcggggtgataaaccacatgcccaacaggatgccgatgctggagacgatctgcggcagcggaaaccacggcgagcgataggcccgaggcaagtccggacgccgaatgcgcaggatcaccactgacaaggtcaccaacaggtaagcgaaactccacgcgcacaccgccgccagcaccaggtgcatgatgttgtcggtgttgccgcccagatacagcgcgtgcaggcacggaatcaacatggccaccaagatgcacaatagcggcgtcttgaaacgcgggtgcaggtaggtgaacaccttgggcaaggcgccatccaccgccataccgtagaggatgcgcggcacgccggccatcagggtattgatggtcgcagcgcccgcgaacagaaagccgatgcccagccacaacggaccgatctgccccatcacctgttcggcgaaccgggggatggccatgggtgtgtccaacaggtgaacgccggacgccacatcgagcaccacgttctccacctggcgtttcatcgccgcgccatagatgaacatgcaggtggccacgcccatcagcccgagcatcatcgcccgtggcatcaccttggccgattggcgcaggtccggcgccagcggggtgacgaactcgcagcccacgaacatgaacatcgccatgcccaccagcgacagcacggtgaccaggtcggtgcccaccaacgactcgccgaaccagccctccaactgcaccgccggcgcggcgatcagccccagtacgccgaacaccatcagggtggtccacatgccgaaggtcaggatgatctccgcgcggccaaatgcgctgacgccaaaggcattcagcacaccgaacaccagcacgaaaccgacgcccagcaaccacgagccgccggccgactctgccagggtattgaggtgttcgaagttcaccagggccatgacccctgcgaggatggtttcggcggtgccggcgaacacatgcacgatcaggtaggccgacaaggtcccggtgatcgcaaagaacctacccatgccgcagttgatgtagtcgtacaccgaaccggtggtgggcagtatcgaggcggcctcggcgaaggtggtggcctgggccagcatcatcaccacggcaatcagcatcgccagggcaaacgcactgccaccgatgccaaagcccatggtggcggtgaggatcaccgggctggccatgatcaggccgatagtgctggccaacgcagtgggaaaacctaccgtgccccggttgaggtgtgcggtgagtcggtcgttgatcgacatggaggggtcctcgaagcggtttttttaatgtgtcggcactctgcgccccactcccgttgatcgtcttgcccctgtctgccgccggttttgttgctgcctgccagggcgtgtggcctggcggccagagtcaattgcctggcacgcagggaaaagacttggcctcataccgctcgccctaatgcgccctcactcttaaccaagatgggggcaataacaatggagcacacactgaaaaaccgccgcctgcgccaggcggtcggcctgggcgtggcactgctggtgggccaggcgcaggccatcgagttgtatgccgacgccgacacccaggtcaccggcaacttcctcgccgtgtacggtatgttcaacagcccgaagaactacgatggccgcagcggcggctccacctggcgcgaggcgttcatcaagtacggcctgagcgtcgaacagagcctgggcaacctgggcggcgtgtatggcacggccaacctggtgagttccggtacctggggcgatggcgatgcggcagggctcaccaacggcaccgagcgcaccaccaagtttgacgaggccttcgccggctggcggtctggcgagttgttgccagcgctgggcaaggatggcctggacctgtcgttcggtcgccagatcatcatgctcggcgacggttttatccttaacgacgatggccccaacctgggcaatggcgtgggcgacggcgagttcaatcgcggcggtgcctactacatcgccgcgcgccatgccttcgataagacggcggtgattcgcctgggcggcaaggacggtgtgcacggcagcctgatgtggatcaagtccgacaaccgcgcccaggcccttaccgaaatggccgccggcaccctggaatacagtgccgcgccgggcaccctggggctgacctacattcacggcatcgacgtggatgagcgcttcgccaccgacctgcagcgccagcgcaaaggcatgaacctctacagcctgcgcggcgccggcaatgccggtatcgacaacgcgcacttcgccttcgaactggcgcgccaaagccgtcgcgacggccaggaaaatgccggttacgtcgaagccggctacaccttcgccaacctgccgtggtcgccggatctgacctaccgctacgcccgttattcgaagaactgggacgccatgttctcaggcttcaaccgtggctacggcacctgggtgcagggcgaagtagcgggcaactattccggccccttcaacagcaacaccgccgtgcagcacgtggcgctcaaggtcaagccactggggaacgtcacgcttggggcgctgttcttcgactacaacaccgtcagtacccgcggccaattgaacctcgatggccgcgaactggacctgtatgccgaatgggccgtcaacgagcacctgatcatcacgccgctgctcggcctgtacaaaccgaataaatcagccgaaaacggcggcaatcaggtcggcggcaacggcaccaatgtctacagccaactggtggtcgccgtgccgttctaaaccgcctcgggcgcgcacggaggcagcgcccggacctcagcataggcgccctgatgatagagcagcggcgcacggccaaaatcatcaaaggccaccaccttgccgatcatgatccaatggtcgccgccgtccacctgctggtatttctcacagtgaaaacgcgccgagcaatcggcgaacaccggcgagccaccctcccccggctcgtattcgatcagggcgaagcggtcttcacgggggcgcgcgaaattgttggatagatgcacctggtccgccgccaacacattcaccgcaaagtggctggcctcctcgaacaccgcatggctgttggagcgtttgtcgatgctccacagcaccagcggcgggtcgagggacaccgagttgaaactgttggcggtcacgccgaccttgcgcccggaggcggtggcggcggtgaccacggtcacgccagtggcaaaattgcccaaggcgcgacgaaaggctcgtgggtcgaatacgtcagacatgcaagactcccgggtggcctcgatgggccgccctgattgttgtagggaaaacgcggctacaccatgctcgggtcgggttccaggcccatcagctcacggccgaggatctgcgcgcacacgtcatagtcggtgtaggcatgggcgccggtcatatgggaatcgcggaacaggcgctgcatttcgttctgttcgaaccaggcattgccaccggcggcagcgaacagccggtctaccgcttcgatgcacatcttcgtggcataggcctggttggtgcgccagaacgccagggtttctcgcgctgggtagcggtgggcggcgctgtgttcggcgtggtcttgccaggtcttctccaaaaacgcccgagcggcggccacctggtgggtggactcggccaagcgcatcagcgccggggtcgctgcgccgacggcagcgccggtgtaggcacgtacgcggtttttggttttttcgcggaatacctccagcatgcgctcggccacgccgaggctgacggtggagaagccactggcgaaatacggccgatacggcgcgtagaaaatctggctgtcagggtacaaaccaaagcctgcggacttgccttccatcatgtccttggccttctggatccggtgctcgggcacccaggcgttgtcgatgatcagggtcttggtgccgctgcctttcatgccggctgcaaaccagtcatcgcggatctgatagtcactgcgcggtagcacggcaaagcagtagtcctgggtgccttcggcattctggcgacggcagccgacaatcgcccattcgccatggtcacagccgctgctccagcccatctcgccactgaagtacacgccgccctcgccctcggtcacccggccgaacggcgcaatactgctgctggccgtggcatccgggttggcgccccagatttcctcctgcaactgcgccgagaacagcgccagttgatggctgtgggtgcacaacaaactcatggcccaggcggtgctggcacaactgccggcgagcaaggcgatacaatcggcgaattcgggcagcgtcagttccaggccaccgaacaccttgggctggaaggcgcggtgcagcccgatgctcttgagcagcgcgatattctcatccggcacttgtcgcagttgttcggcacggctggcgttcgcggcaatggcaggcagaagaggcttgaggtcttcgaggagcgggtttggctttttcatggacggccctgcttattattggaagtccggcagacgctccgaatcgtggaacggcgcgggatgcagggccagtatcgaccggcttgcgccggcacaacatgcacgttcggcaggcaaggttgtacttttcacaggcacggcaggcacaggcataaaacctggcaggcacagtcaagccgcgtacctgcccgttggttaacctcgagttttcttttgtgaactgccaggaacctgccatgagcgatatcccgctgctgcctcacgtcgaagcctttttgcgccgccgtcatgggctattcatcgacggcgccagtgtgcgcagccacgccgatgcacgcctgagcgtgaccaaccccgccaccggccaggtgatcgccgacgtggccgacgcagacctggcggatatcgacgccgcggtggcttgcgccaaccggggtttccagttgtggtcacagaccgcaccggccattcgtggcaacgtactgctgaaactggccgacctgctggaacaccaccgcgaagaactggcgcagatcgaaacctgccagtcgggcaagatcatccagatttcccgcgcctttgaggtcgaccaggccgcgcacttcctgcgttactacgcaggttgggccaccaagctcagcggcaagaccctcacgccgtcgctgccttcgttcaatggcgagcgctacaccgctttcaccttgcgcgaaccggtaggcgtggtggtaggcattgtgccgtggaatttctcgaccatgatcgccatctggaagctggcttctgcgctggtgaccggctgcagcatcatcatcaagcccagcgaattcacgccgctgaccctgctgcgcatcgccgaactggccatcgacgccgggttgccggcgggcgtgctcaacgtgttgaccggcggcggccatgtcggcaaggggctggtggaacaccccggcacgcacaaggtgtcgttcaccggctcagtgcccaccggtattgcggtgggccgcagtgccatgggcgcaggcctcacccgcgcgaccctggaactgggtggcaagaacgccgccggcttcctgcgcgacatggatgtagacaaagcggtggatggcatcatcgaagcgggcttcttgcactctgggcaaatctgcgcagcggccgagcgtttcttcgtgcaccgctcgcagatcgatgccgtgctggaaaagctcaaggcacgcctcagccgcctgaccatcggctcgcccctggacgaacacaccgacttcggcccggtgacccaccagcaacaccaacacaaactgctcggctacttcaaccaggcccgcgccgaaaacaacacgatcatccacggcggccacctcatcgaccgccccggctgctacgtcgaacccaccgtcatccttgccaaccacctgcacgacaccctgctcaacgaagaaaccttcgggcccatcgccaccttcctgccctacgacagcgaagacgaactgctggccatgatgaaccacgggccttacgggttgagcgccagcctgtggaccaatgacctgggcaaggccctgcgcatgatcccggccgtcaaggccggcaccgtgtgggtaaacatgcacaccttgctcgacccggcagtgccgtttggtggcagccggtcttcgggattagggcgggagtttggcagtgcgttcattgaggattacaccgagcttaagtcggtgatggttcggtattaagggctgagtgccgacgaccggaatcagggcgcaggtttggcgggtgggccacgaaacaggttcctggaaatgatgtcggccttcagcatcttgagttgcagatgacgattcactgcgccaaccccttccatataacgggtgacatggcgcttccacgtatcgaccaacacgaagggcgccaagccaattgcaacaaacggaaaaataaccaaaccgaaaaggattttcataagttccaagcacccttgcaacaaattcacagggcccaaggatttttcataatgcaatttcttggtcaacacgtcggaaatcaggttcgtgccgatggcggcggttacaaacgggaaaacaaagaggaacaggttggagcggtgtttcacctggtcaaacagagcaccgctgattttgcctttttcgtgcagtgactgcgccagcccattgaatgcgtcgatagagaccacggcacacgcggcaatcgaaatcagcgcaacgccggtcgccacgacaacttgcggcgtggtgtctttgtcgagaatgaagccaatcaccgccatcaccaacacaaaggccatcaccaaaaagcccagttgcacatccaagccaaacaacaattcgtaattcatccgtgaacctctctatcaacactaattaaaataaccagctgtcactgataaggaatcaagtgatcgtgctccagatcccgcatcaactcgctcaacatctcgctttcgctgcggggctcggtcatggggatgtaccaggtcgtagctgtccaaccaccacgcttgtaagcataggttttgagcagttgcccatccttgaacagcgagccgtgcaactggcgctcgtaggtgtagggcactggcacggtcaacagcgtcaacgcgccaagtatcgccgggagcgcaccggcccctttaccgccgcgttgatcgaccaacaagctgtagcccgtcttgctgaaaccgccatccataaaactgaaggcacctgtgtcacgcaacaactggataacttcgcgttgcgtctgctgttcaaacctcgacacgggcgacggcatcgtgacactcatcggcacgtaggcacgctctgccttgtaatccaacggtttgagggcggtaccgcaaccaccgagcaacagcacggcggccagtaacgtagtcctgatcattgtgcgtgctcctcgggcagcagcccgtcgcgctgtacatcttcggcaaaagcccgtgcaacacggtgaccgctctgtagctccatcccgccagggccatccagcagccaggaatatttgtgggtgacgttgcggtagctgtactgcttgagctgcttcccattgtgctgcagggagaactcggtggtggtgtcaatgctcacggacaggggcagcagaaacagagttgccgcgctcagcagtaccaccgggaaaggcggcatatcacgctgaacgttgtagcgcacccacaccgagtaatcgtccgcgttgccccggccgctttcgacactgcgaaacaccccagtctcacgcaattggttacgaatttgtgctgcattaagcgggtcatcgatcatgacgtggatcggcttgaggtattccttgccatcgggcaatgcacgctcaggaagcgtatgggtggttgcacacccggtcagcagcgccagggcgctgaacgtaataaaacggttcatgggcgtgtctcgtgaaggatgttctgacccgccccggatggcagcggcgcgatgatataaggggcggcgctgcgataatccagcggcaacaactccagagccggcaggcccgcaacagagtgccgcgctagcggctcatcgcgtccttgctggtcgcgccagcggaaggcacacagcgaagcgccaaggcataacgagcgaaattcaccgaggtaataggcgttgccggccttcaggcgcagtggcaggttgaatttctctcgcgcctgcaccgaggtgtaggtcgtccccagagtgggtgaataactgctggagaaaaactgaaaatcatagaactcataatccccaggcttgagcgccaacacgaatacactggcggcaccggccgcatccttcacatcctgaggtgtttgccgaccgacgcccacccagatcgctgcggcgccaaactcggaaccgcgcttgcgaaacagtaaacgctgattaggcgcaggagatgcgctaaggctctgcgggccgattgatccgactacataagcgaccgggtcctgggggccaggttgcaacggctggctaaccagcgacgcagactgagtaccgcaacctgccagggctgccgtaatcaagaacaaggccaaaggccgagagaagcgagacatatcgaatcctgaacgcaggcaaaaaaataaacggcaggcgtcaggaaaaatatgggatgagccttcctggcgctgcgcctcgcgtcactgcgaggggggcgaatggtacggggggaatcgcggtttgactacagatgatcagcagcatgtgtcagcgctcggtgaaagccactcatatcaccgcctccgcctcaatctcaatcaaccactgcggcaacgacaacccgctgacgataatccacgaagacggtggcgggttgtgcgggaagcgctcaagtagcgcatgggcgatcgacgcttgctgctcacgggcagactcgacgatatacagccgcagcatgatcacatgagacaggtcgccaccgacctcggccagcaccttttcgatattgtccaacgctgcggcggtctgttcggcgatgccggggccgaccgtgtgctcttgagcatccacgcccacctgccccgacagcatgattcgccggccctctggcacttccatggcctggctgaaaccgtattgcagggagttgaataccgtcgtgggattaatgacctttcgttgcatgaccaatccttgttgtcagtaggaaaacaaggctaacccaaaggaatcgctaaggatgatggttcaacatccagcaacatgttcgtgggtgaagcgctgaaccttgagtgcccggcggcctgatgaaaacgcgcaaacccaccaggcaatcacatcccctgtaggagcgagcttgctcgcgaaaaacccacaggcgccgcgcttactcaggaagcacgcgttatcgttaacgtgtttcgcgagcaagctcgctcctacatggggtattcggcgtacccgcaacggcgcggttgtcagaccgcgcttacacaactttcgggttgcgtccgatgagcctcgccgctaaccttcgcgggtcgctgcaaaatcagcgaatgggtgtggtagcccagttctttcatagaccccaaaaacgctcaagggcgtttttttatgcgggctgctttgtggcggctgtgcatgggaggcttcggcctgccgggtttctatgaccggtctaccaccccgtgtacagtcgcctccttacttcgtgtggtagcgaaatggaggtgctcattcataggagcttcgccatgaaaaaagtcacacccaatcccccaccgtccccctcggatgaaaacccgcaactgcctccagatgtcatcttcaccgtccgccccggactcagcactgaagccgccttgagcaatgccagcgaaatgctggagtccgcgactgtctgcgcctacgactgtgccgaacagcttgacggtcacgcccgcaagcaggtgttggcggtggtgcagatgatcgagattgcgcagttgctggtagatgaagcgctgaaccgtgagtgcccggtggcctgatgaaaacgcgcaaacccaacaggcaatgacattccctgtaggagcgagcttgctcgcgaaaaacccgcaggcgccgcgcttactcaggaagcacgcgttatcgttgacgcnnnnnnnnnnnnnnnnnnnnnnnnnnnnnnnnnnnnnnnntatcgtaaattgccgccttttccgaaaaatcattcaatgcgcttataacgtccgccgggagcgcatccagagtctcaggggcgatgccctttcgcaccagattcttcgaaattgtcagcgcctgctcatcgccgaattttttacgaatattcgctgaaacatcgtcaatgctgacgcgctgagcctgaattgcacgaatttcgcccttgatctgttcgagcgcgccggcaactgcttcgatctttttcttttggttgtctttgaaattgacaacgtctgcaaccagatctttggcggctttctcaggatccatcacagcatcaatggacgaactactcgcatacaaatccgttcgtttttcatcatccttggtgatctcataggccttacccacatcccggttcaacccggccgtagagtcagcccccgtctcagcatccttgcgtacaacgatttcacctgcccccaccgtggcgcggacaatctgttcacgttctttctcgtagttccaaccctcaacgctccagccggtttgaccttccttgccttttcccgcctggctgctgtcttgtacggtgttgcctttgctttcactgctcccggctttataggtgccacctacgttcaggtagtacccatgctctttgtcttgcccggcgatatcgctgaagccgagggtgccggtgtccagtttcaggttgccgttgtcagcggcgatgacggctccgtcgatctgggtatggttctctgttctgatatcgacggcatttttgccggtgatacgggtttgctcttcgacccagtccgttttgcctgtggtcttgccaaagccgaccgagccgctgacacccgcacccgggccgatggtggccgtaacgctgatatcaaactctttgcccttgaccttgcccgtatcagcgaccgacgaaaccttgaggtcgccgcccacacgccctaccacttcatcgcctcttagatttgctccgccgatggtggtgtctttgccactggcgaaacccaggcggtcgccggcatagaggtaagcctcttgttggcgttggccttctcgctccaggttacccttgcccatactgacgctgacgtagacgccaataccttcagagccaaacgtcaggcctgcttccccgccgccactgtggcggttgttttcgctgttgctgtcgttatgcgccgaacgaatgttcaaatcgttgccggcattcagctcgatatcccgttgggctttggcctgcgttccaatcaagttcaggtcattgctggccttgaggttgatatcgcgaccggcttccagctgtgaagccgtagacgagccttgagagctctcgcccgtagccgtgccgaagctgccgccggcgcccaacttgatcccgccgctggtgccgccatgaatgccgccccaactttgggtgtgggtggtttcttcactaatcccgcccttggccacgtccagcgtgacgtcacgtcctttgatattgatgtcacgcccagcgtccaggtggcttcccttcaccagcacatcgttaccagcgttgaggtgcaaatcgttaccggcgctcagcgtcgaagagcgattggtttgctcgataacctgctggctgttggtttgtttactgttgccaaactttccgtccagcgttggcccgctgacaaactgactgaccgaatcaacggctttgagtgtgctggagcccttgctgacattgtcctcgccttttcctgctccgctgacggcatccttggtattggcatagttatggttgatcgaaacacccaggccgttgctctctttctcgcgtatctgctcggtgagcacgctttcacgcgcagcatcgatattgatatttctgcccgccgtcagctcgatatcattggcagcgcccacatcagagccgcgctggttgatatcacgcttggcgttgatcgccacatcttgcccggcgctgatctggctgctggaagcggtctcgtgttcgacacgattcttctccccactgccttcggtcccggcgaagatgctgatgccattaccgttactggagatgcttgaacccgtctgctttttcttctcccagctacgttcgctgctggtgtcttgtgcggcgaccacattgacgtcgcgccctgcatccagattgacattgcgccctgcggtgatgccgctgccaaccaggttgatgtcgcgttcagcctgcaaagttgcatcgcgctcggcgctaacatggctgcccacgctggtgctgctctgggcttcacgaccggccttcttcgcagacgaaatggcgactgatgtcggcctttccgtataaccaaacttcttcttgtgttcttcactgcgactataagccgtgtcattcgcagaaatcaggttgatgtcacccgtgctattgaccagcccggaacgcagttcagtgtcgttatcggcactgatctcactggcccgcacccgtacatcattacccgccgccaccacaacatcattgcccgcctccaactcactgcccacttggctcgcagtagtcttcaactggctcttgccacttttggacagccccaggaacccggacttggttttcttgctgtaggagccatgttcttcgacacctgacaacaccgcgatgtcacccgtggctcccagcaacatgtcgccaccggccttcaactggctgccgatcacggtgacgtcacgcccgccatcgatgctcatgccgccatcagtcttcttgctggcattgatggtcaagtctttgccggcttcgacgacggaggctacgttggtgctgtcgtaactttcccgctgctggcttttgctacgaccgaacgagcccttgctctttttcgagtagaacgaagcgtcttcgtccagggcagagaggatgctcacatcgcgctgtgcatcgagagccacgttgccgccgccggcgattcggctggcggtgagttccaggtctttaccggcattgagcgacacgtcgccgccggccgtcagcacgctggaaacctggctgatatggtccttggactgggtgaccttcttggacttgctggaggaatgctgttcgtcagcggctgaggaaatactcaggtcctcagtcgtcgtgatgctcaagtcacgcttggcgtcgatgcggctggcaatggcgctgaagtctcgccctgccgataccttgaggtcacggcctgcctccacgctggcaccgttttgcgtcacggtttcggtgcgcaggcggctgcccaggtccaaaccattgcgttgctcaacggcatcgatgtgcacatcgcggccagcgaccaatgtggtgtcacgcccgctttgcagcacgccaccggtattggcgatgtcacggcctgcattcatcgtcaggtcattagctgcctcgatgcgtgacgcactgtcgagatagtcgcggcgctcagcggtgccgttgccggtacgggttactgcacggtcgttgatcacatcacccttgatcgccgtcagcgtgacatcgcgtccggcgatgatgccgccggacttgttgacgatgttgttacccgccagcaggtcgaggcggttgccggcttcgatcaagccgctgttgatcaggtcattgcccgctttggcggacaggttgttggtggcacgcagggtcccggcgttctccaggttttcgccggcgatcaggttaaggtcgttgcctgcgatcaatgcgccattgggtgcaagacgattgtcggcctgggccatgtacagcaccggcaccagcaccttttcaccgttcacttcgtgctgttcgagccagacgatgtcatgggtcagcgccgcgacctgttgcgaggtcaaggtaacgcccactgccaggttcagttgctgcttgctctggatcgcattgtccatcaggtacttgaacagcttttcgtcggtgttctggccgtcgataaaacgctgccctgtgcgcgcttgcacggcctgctggatcaagcgttgctcatagagcccgtcgcccaggcgcttggcactttcgtccgggttgtaacccagccctgcgagcaagtagtcggagctcatgaactgcttgaggtccgtgagcaccgggttggtttcgatcaggtatttatgaggttgcgactttggcgcggtaggcatgaagccttgcacgcggttgatggtctggctggcgactggagtggtttgcgccagcgcattgaccggctgggcgatcacctccgcgacctgggttgggctgctgcccgcaccttgtgcgacgggtgtgttcaccaccggctgcacgcctggcataaccggcatcacgccagggatattcaacgtcggccgagtgggctcgcccggtgtggcgacctgaacgtgggtgtctctttgggtcagcgctaggtctggctggtccgtaggccctgtgaccttcgccactggcgacgttgaaccgctggacggatcttgggcgttgataccgtcgccccgggcgatttcacctggggtgatctggctgggcgtccagccactcccgttggccacatcgccggccccggcaacgttaagcgttctggtggtggcggtgacaccactgacctgacgtgcagtggagcccacctgacgcgtagctgcgccctgttgagtgacgcttttgaaatcgaaggtgcgcgtttcaagcgctggctgtacatcctggcgttgagccaggccgagggtcgcaccgcccatggtccagctttgtgggccactggtggcttgggtggcctgggtatcctcacccgcccggctactgaggcggaacaggccgtgggtgccggtgggtaaagtgaacccgcgtagcgtcaaggggttgacttgttgttgggccaagtccggtggcagctgcgcattcaagtcgattgcaacaacagcattattgactggacgagtggcatcaaacccacgtccggaacctgtcgatatcggctggccctcttggatgacactgttgaccagattcttgctggcattgatttgaaccgcaccgccagcctgaacgatggcttgggcagtgcctgcactgccgggcttggagatcatccgctgatcgtagaaattgactccactcagagtggccggtaatgccgacctggtgcccgcgttgtaggctggcgcaggaaacagggcttggaaattgacattgaaggtcgtgtacgttttccaaccaaacgtcaggttggtttgtcgctgagccgtcccccccattcttgtgtagggcgtcaccatcgactcgttccagttttgatcccagaaatgcagggttcccgcgcgtctcgaaccggagccttgaagcgtataggacggatcattcgcagcgttgtaatccatgatcgaacgccagaaacgggagatattcttgtcttccttgaggttaggaaggtcgaaagacttgagaaccgaatactttcctaatgtggcgccaacgttactgaagttttccagcgcagcactgatattgccggtggccgaaataaccgaggcagagttcaacaggctacgtccctgaacatccaggttcctgccggacgagatgcttgcggacaccgactccgcatccaccttggattcatattcttccatcaataccatgtgcccggcccgtgccgacgtgcctctcatcccgatagcgccggaaaccaatgtcgatgaaacattgaagaattcttttttgttttctatcgcgcccacatggagcgtcatatcgcccgcgctttccaggttggccgaaatattgttcagggtgcccgcccaattgccctgtatatcccgggcgacaaagagtttgcccaggctgtaaacatccgcgtttttattggtaaaactctcggccagcagcgacatgtcaccaccgctgatgatcgcgccgcgctcgttgagcaaggtctgcgtgtcaatcagcatgccctcactgctgccaagagtgcccgcgttagtcagcgctccagcactgatcgccaaattgcccatggcgctgatacggcccgagttagtcatttggcctgcgacgctgatggtagccccccggccccccgtaatacttgaagcagcatcaaggtttaacgaagcggcgccgacgttcagggtatctacgctgctgatacgcccactgccgccgtaggtccccgttagccccaagctgagcgtgccatcactggcaatcaacccattattgacccagctcccccccttcccttccaagtgcgtcgaagccagcaactgcccggtttcggtctgggtgaagttattgacgttaacgttcaaacgccccgcctgaataacgctggtattggtccaggtatccgcgttcagggtcaggccgccacgggtgacaacggtgccgccggcgccggtaacgttaggcaatgagatgtcgaatgtgccctcacccacatgcagcaactgcccgccgttgttttggaagctggcggctgccagggtcaggtcctggttggcggtttccaccgcgccgttgcggttatcgaacacaccgccgatctggaactcggtcttgcccaagcgtcccaaggcgcgcaatttgccgccctggttatcgagggcattggcggccacagtcaggttgttggtgctttcgatcaggccgttgtggttggtcagttggccgttgaggccgagcgcgatctggtcgccggcgatctgcccggcgctgttatccagagcgctgccattgatgcgcatcaggcctttggcatacaaagcaccctgctggttattgagggttgcaaccgtgagcaatgcatcgctggtttgcgcgccaagatagccgccctggttatcgagctgactggtattgagtagcaggcgctggccctgaatcaagccgcccttggggttgccgctcaggtcaggaccgttgcgaagcacaccgaccaccccggcctcaatggcacccttgaggctggcgagcacgccgctgcggttgtcgaggttgccggccttgaggtgcacgtcaccggtctggctgatgatattgccgccttggttgtcgagatcaccattgacctcgacccgcaagccgttttgcccctgcactttgccttgggcgttggtcaggccataggcgttgatgtgcaggtcgccttcctggctgtagatcaagccgtcagcgttgttttgaacgatggcgctggcatcgatgcccagcggacctttggccgcgacggtgccgccttggctgttgttcaggccgcccatggccaatgacaggcgtccctggctggccagttgaccgccgcggttatccacctcgatggcgcgctggagtagcaacgacccagtgcctgcgatcttgccgttgacgttgccaaggttgccttgcaggttgagcaccagatggtcgttacccatcagcgagccaccggtgttgagcacgttgccgcccaggaagttcaggttgcgcagggccgtgatattaccggcactgttgtcgaggtcggccgcgctcagatccagcgtagagccgctgtcgatcagcccaccttgggtgttgttcagcgcgccaagcacgctcagcgtctgctgcgcgccgctggagattgcaccgctggcgctgttatccaggctggcggcgctgaccgtcaatcgcccttggctggccaacgcaccttcgccactgttgagcaagctgccattgaggcgcacatcaagatcaccgttgcgactggacagcgtgcctttgtcgcggttatccaactgagtgccgatcaggttgaggccctgccaacccgagatcaggccgccgcggttgaccacgtcgcctgcgttcagtgtgagtaattgctggctgataagcgtgccggcgctgttgtccaggttgcgtcccgtcaagctcagggcattttgactggacagttcgccgccctggttttgcaggtcgcgcacgcgttgcaaagtcagcgggcctttggagaagatcaggcctttgcggttatccaggtcaccgtttgccaggtccacgctcaggcgctgttcacctatcaaccggccgccacgcaaggacatggaagtgagtgtgaggtccatgtcccccttggccgacacctcgccaccgtcgctggcgtctaaactatgtgcagtgagttccaggctgccctggctgttgatcaggcctttggcactgttgtccacggccaacgccttgagcgtcagggcgctggtacccagtaggctgccgccctggttattgaagttgcccgcattgactgtcaatgcttgcgcggcgttgatcaaaccttgttgcccgttgctcagcagcccggtgctggtcaattcaaggccaccacggctggtaagcgtgccgccactgttgtcgaccgcggccgcttgcgcactcaggcttgcacctgcaaccaaacccttgatgttagtgagtacctggtcgatacgcagcgtcaggccctggttgctgagaaggcggccactgctgttatccaggttgcgcgccgcgatagtgaatgcctggccactggaaatttcaccggcctggttgttcacaccgttgagctggctcagcaccagcgggccggacgcattgatcaggccttgctggttgttgagttggccgtggttcaggtccaaggtaagtccggcattgctgaacagcttgccgccttgttggtcgagcccattcacgctggccgtcagggcctgggcgctgccgatgctgccagcgctgttgttcagcaacccagccttcagcgccagcgtgtcgccgctgatcagacgaccccccgtgttatccagcgcgccagtggtgaccccgaccgcgcctttgccactgagcacgccgttctgattgccgaggctggcgctacgcagttgcaggctactgtcagtcacgagttcaccgccctcgttgtccagcgcccctgtcagacccagcgccaacccctgggcactggacactcggccctgacggttgaccaggctgacggcgttggcgcccaagcgtccttcgctgttgatcacgccctggctgttattcagctcgcctttgagctcaagttgcagtagctgttgggcgagcagcttgccattgctgttgtccaggttctgagcgctcagcatcagccgctgtgtgttgagctggccttggttgcgattcagcagttgggtgagcgcaaggttcaatgattgcccggccaatacacgacccgcatcactgttatccagggtttgcccggtgacggtcaggtcggcgttggtcgacagttcgccaccacggttgtcgatgtgatcgacccgcagttccagcgttttatcggcgcccaccaggcctttgcggttgtccagggacgcagcgcgtatatccactgctgtagtgctgatgagttgaccgccgcggttatcgacctgatcgacatcagcagtcaccaaggccttgcccgatacatcaccgccacggttgtcgagccgagcggacgacagccccatggcaccgtcggcaatcagcgtgccgcgctggttatccagcgcctgggtggcagagacttgcatgacgccacgactgttgagcagcccatccgtgttgtccaggcgggcactgttggcgttgagcgaggcggcgctgatcgcacctttggcgttgcccaaggcgtcttgaatctgcagggtcaggccttggttactgatcagcttgccgccgccgttatccaggttgcgagccgccagcgtgaaagcttgctggctggaaatttcgccacgctggttgttcacctcggccaggtttttcagcatcagcaacgggctattgatcaggccgcccacgttgctcaattggccgtggttgaggtccagatcgagctgcgtgttgctgaacagctcaccgccctgctgattcaggccggtgaggatggcggtcaggtttttgctgctggcgatacgtccactgttgtccacctgggtggctgccagatccaggcgatcggcgctggtgatacggccattgttgttcagcgtcccggtggccagggtcagctcaccacggctgttgagcaggcctttggggccgttgtccaggcttgcgctggtcaggtcaaggctggcatcggtctcgatgatgccgccctggttggtgatagcaccgctggcagccagtatgagtgcgtgcgccgaagagattacacccgcgttgttgttgagcgtcgtgccggccagttgcagggtgccctcgctgctgattgtgcccagctggttatccagccggccatccagttcagtgccgggaacggccaccagcgacatgctcagcgattgctggcccgcaaaagtgccttggccgttatccaggcgcgcgccgttgaagcggttgtcccgggcgaataccaacccttgggcctggttgatcacatgggccacggccagttccaatgcggtaccggcgatcagtttgcccgcgctgttatccaggcgctgcgccttgaagtcgatgctgctgcggctggaaatctcgcccgcacggttatcaacggcgtcgaccgtgagtttcagcgcttttgtggcgcctaccaggccgccctcgcgattgtccagggaggtcccgctaaggctcagctcatcctgggcgaccaactcaccgccttgttgggccagtacaccgatagttgcctgcagatccgcctggctggcgatgcggccagccgcgttttctacagtgtcggccgtcagccgcaggggccccacggcactgaccaagcccttctggttgcgcaactgttgccccgcgaagcccaaggccgccttgctgctgagcgaaccgtgttggttgtccaactcacccacattgagttgaaggtccttctgggaaaggatcacgcctgagcggttgtcgacagtcgcactgtgcagcgtcaacaggtcctgcccggtcagttgcccttcgcggttatccaaacgaccggcacgcagttccatcgcgcccttggccagcacctgccctttggcctgattgtcgagtaacccatcaatcgtggccttgagttggccgtcgctgcccaatttgccggcctggcggttatccagactagcggcgtgcacgttcaacgaggtgccggccccgagtgtgccggcctgattattcagtgcgcccttgaccttcacgtccaggctgacatcaccgagcacttgcccgccagtgttactcaaactggccgccttcagctgcgtgtggcctgcactgacgatttcgccctggtcgttaagcaggtcctcactgaccgccaggcgcgcatccagcgcgctgctgaccttgccttcgcggttgtccaggcgcgcggcatcgagctcgacaccggcggctgaaatcagccctttgacgttaagcagcgcctgttcgattttgacggtcaagccttggtcgctgagtacgttgccgccgctgttgtccagggtgtcggcacgcaaggcaaaggccttggcgctggagatttcaccgttacggttgtcgacgcttttgaggtttttgagcaacaactgccctggcgcgttgataaagccatcggcgttattcaagtgcccctggttcatgtccagggtcagttcgctgttgctgtaaaactcaccggctccacgctggtcaaggctggtgaggctggcgttaagcgcctggtcactggcaatgcggccctcgaagcggttgtctacgtcggtcgctgtcaggttgaggcgatcagcgctggtgacacggccttgatgttggttaagcaatacgcctgtggtcagttgcagcgcaccgtcagcaacaatgcgcccctggctgttgtcgacactgtccgccttcaccgtcgccgtatcagcgctgagcacctcgccgttctgattggcaaggccattggcggcgctcaacagtaacgccccgccgctgctgatacgcccgccgttgttacccaggctggcgccgcgcagttgcaaggcggcgtcgctgcgcatgacgccttggctgttgtcagcctgttcggccagggttatatcgaggttgcgcttggcatagacactgccttgggcgctgttgtccaggctggctgccttgaggttgacatcctgttgcgcagaaatcaggcccttgagctggttgttcagcctgtcgagcgtcaactgcagcgtgctattggccagtacgcgaccggcattgctgttgtccagttcgcggcccgtcatcgtcagttcggtaacgctggaaacttcaccccctcggttgtccactttgccaatggacaggttcatggcctggcccgagttgagcagcccggcctgacggttatccagctcgtcacccttgacccgcaattgcccgaccgaggtgatgctgccaccgcggttatccacactccccaccaccagctgcgcgtcccccttgctggtcaggcggcccttggactggttgtccaggctggcggcattgaccatcagcatctgaccggcagctagcgtgcctttgtcattgttgaccgcgccgtggctggtcaaggtcaagcggttatcgccctggatgcgcccctgactgttgttcagcgcagccacttcgactgtcgagtgctgacccagtaattcaccgttgcggttgtccagcacaccttctacgccgaggttcaggtcggaaacggcactcaacttgccaccctggttgcccaggcttgcgctgctcacctgcaaggccgcggcagaaatcaagccgcgtgtgttgtccagcgcttgggcaatacgcaaggtcagggcttgctggctgagtaccttgccgtccgctgtgttcaaggctgttgccgccagctcaaacgcgtgggcgctggaaatttcaccgccctggttatcaacgctgcccagttgcttgagcagcaattgccccggcgcgttgatcaaaccaccgttattgttgaggtgaccaccttgcatatccaggcttacatcggcttggcttgcgacatgcccgttacggctgttgtccagtgcggtaaccgtcatacccaaccgggtcgcgctgctaaggcgcccgccctggttgctcagcttgccggtcgtgatcttcaggtcgctggcactggatagtgttgcgtcatcattggttaaaccggaggcattgatggtcaaacgatcatcgctgcgcagtgtgccttgggcgttgttcaactggccgccgagggccacacccaattgacctttggcatacaaactaccgcctgcactgttatccaacccttgccccgtgagcagtacctgctgagcggcaatgcgacccttgagcgagttgttcaggtcggtggcattgacctgcatatcagtgccggcactcataagccccgcttggttgagcaggctgcccgcaatacctgccgtcagtgcaccgtcgctggtcaagttacctgtgcggttatccagactggcgctgttgagcgtcacgctgtgcccagcggccaacgtgccggcctggttgctgaccgcgccgcccgcttggagcagcaacgtcgaatcaccctgcaccaggccctggtcgttattgagcgtcccaacgccaagcacaaggtgtttgcccagaacctttgcactgcggttatcgagttcgccatcgacttgcaagttgacgctatccaccgcagcgagtcgaccggactggttaatcagtgtcccagcccgtacatccaaggcctttgcggtcaacgcaccttgggtgttgtccagggcgcgggcaatgcgcacactcaaggcttgctcgctgagcaacttgccggcgctgttattgagttgatccgcattcagatcgaaggcttgggcgctggagatttcgccgccctggttatcgacgctgttaagttgggtcagcaacaactggcctggggagttgatcaagccaccctggttgttaaggtgaccccgattgaggttcaggctcaaatcgccttggctgaagagttggccgccattgctgttgtccaggcctcccacggtcaactgtgcgcctgcgtcggcactgaaacttccgctttgattggcaagcaaaccacccacccgggcgttaagccgatcacggctgtgaactcgaccgcgttggtcgttgatcaaactggcaacgtcaatatccaggccgctggctgtaatcagccctgcaccgttgtttagcgtctgcacgatcttcaggcccaaggcctggtcgctgagcagtttgccagcgcggttgtccaggctgttggcggcgagcgtgaacccgtgagcgctggaaatttcgccgctgcggttgtcgacgctattgagattattcaacgtcagttggccagcggcgttgatcaagcccccgtcgcggttgtcgaggtggccgttgcccaggtccaggaccgcatcgctattgctgtaaaggcgcccctgttcatgctggtcgaggctggtgacacgggcagtgagggccttggcactggaaatggatccaccttggctgttgatcaccgggccggccgtcagctcgagggtgccaccgctggagagcacgccatgttgctggttgttgaagttgccggcgttgacctgtgcagcggcacccgattcgatgcggccctgctgttgattatccaacgtgccggcaatattcagcccaaggtcgccctggctggtcaggatgcctgactggctattgtccagttgccccgcgttgacctgcaccatctgcccggccaccagacgaccactttgattgttcaccgccgcgctggcagtcaagcgcagcgcctggcccgcagatatcaggccagcgacgttgtccaggctgtcgacctgcaaggtgacgtcagcaaggcttgagagctcgcccttgcgattgaccaaccgcccgatgcggccgctgagcccgcggtcgcccaccaccaggcctgcgtcagcattaagcaaccgggcggcattaacctcaatgcctgcggcgctcaatacgcggccttgctgttggttatccagtgtttcggtcgccaccttcagctggttatgcgcgctaagggtgccgctgcggttgtcgacagtgccatccacattgacggtcaggtcacgactggcgatgacggtcttgccgttgttattcaactgggcggcagtgacgtggatatcgccctgagcgttgcgcgtctgatcagcattgacgcccgcttcgatgacgccgttgttggtcaacaccccaccgctttgcagcgccacgcgatcacgcgcagccaggcttttttgattgagcaagtcgccttgcgtcttcatctcaagcacgctgcccgccgcgaccacgccctgggcttccacgctgcgggccttcacgttaatggtgccggccgctgttgtctggcccatgaccacgtggccaccggcatcgatctgaatatcaccgccggcgaccatgtcccccgacaacttcacgccgacacccgcctcggtccccaccagtttgactgcgcccacatacatgccgcccagcgccgacgagtcaatcgccagatccggcgcctggctgccatccgctgcccgcgcagtagcattcaaggtgcgtgcatctacatcattacgcccggcgacgacggtgagttttttcgcctggatctgcgcgttgagggtggtggcgcgggtgatgatttcgaactgatcgacgttgctggcgttcaggccggcgccttcgatggcaacactgccctggtcgacctggtaacgagtgatctggccgttttcgatcacggctttaccggtggtgagcgtcgcttgcggggtgttgataaagccgcaaccgttacagctgatgccatacgggttggcgacgatcacatgggccgattgcccggccacttcggtgtagccgcgcagttggctggggctgccgccgttgacttcgttgagaatgatattggccgctgtgccgcgcaagttcgggttgccgacgatgatgccgcccagttgcgtggactgagtacggtcggtggcgttgttgaggatgaccccgttggcgccgacgttgtagtcatgaaattggttgtgcgagaggccgttggcattcggcgtggcgatgttgacgatgggcacgccattgcctgcttgcccgagcgtcgtaccgggggcattcaccacaatgccgtctgcctgggccagcaacgggtgccagaacatggcgttggccagaatcaatgccaatccacgtttaggcagccccaggaaatgggagcggctttttacggcagcagaaggctggcgcgcgaggaatgcgtactggcgaacgtccatgtcatgtctcgaagcccgaaggcggtcaaaaatttaaaggaaaaagtccaggcggaaatagatcggcgcttcacggtccgtgatcgcttccggtcgttccaacgagtgtgcaaaggccacgctggccgcgacgttcttgccgcgcgcgaacaactccaccgagttgctgctcatgcgcccatgctgctcggcgttgtagcggccatggctgatcacgccctggtcgtagcccaggctggtgccgtattcaatgaacaccggctgcatccaggcccaggtcaccggccggctccagcgcaggtcgttgcgccaatagccgccgctgtcgccggcgagcatttggtctttgtagccacgaatcgacgactgcccgcccaggctcatgcgctgagggctgaacaacacgtcttcgctgtgctggccggtcatcaagctgctgaagctgaaggactcaccccacagtttgaatggatacaaatagctcaccgtagcggtgtacttgcgatagcgcgcatccggctgcccaggctttggatcgtgattggcctgggcgtcgaatgcgccgatgccgttttgcatgccaaggtcaatgttgaggaatgaaccgccaatacgccgaccatggttgatgcccacttgcgcttcactgaggcggttgctgctcaaggcaagcttgctgtcttcgataaagttgttggtgcgaagataggcgatgccagtgttcaaggacgttttgctcaaagcgtcacgatggatcacccgctccaggcgcaactgatgagtctggctgtcgccggtctgcttgaacttgaaattgttagcctcggctcgcgagcggtattcactgtcgatatagctgtacgagaggttccaccaaccgaaaggcaggctataactgagcatcgaattgcgcgaggttttctggtgatcactgacggcatcgtggccgccacgcagcgaaagttggtcggccaggcccaacggattgtcccagtccagactggcgccccactgctgctcaccggtgctacgctggccgccgttatgccgcgacaagccgacacgccagggtttttgcgcggtgtttttgaccagtacatcactgccccccacggccttgcccggcgccagctccatttgcgcctggttcgacggcaagcggttcaactgatcgaccatctgctcgatttcgcgcagattgagcagttcgccctgcttgccggggaaactcatggtcaattggcggtcggtgatgccgccgccttcggcagctttcaggctctccagcttcccttcgaccacttgaatcttgagattgccgctggaaaggtcctgctgcagcaagtaggcgcgactggtgaccaggcctttggccagataacggtcggtgatcaccttgagtactgcgttgagctgcggcacaccaagacattggccgacatagggcttgatcagatcagcgcgctcaccttcgctcagcgcatccgcaccgcccagctcgatggttttgatcgcaaagcagcgcgtatcgacgggggttgtcggggttgccggcgcggcggacttgccgggcaggtctttgagttcttcaaggcgccgttgctgctcttcgagcaggcggtcctggcggtcacggatcaggtcggtgatgccgggagcgttctgcggcgtagccgcttgcgcccatccggaggtgcctaggcaaaaaaaagcggacaacaggcttaacctggtccgacgcggtaaacgccacactttatagatccctctatatggctttatgccatccaatgtggcgatgataagatgtcattttgatggcgtcaattaagcgtgcaaattcgttcaatcctttatgcagagctgcgcgggcttgaaatgtagagttttttgggggttgagccctaccgctaaactatgacgctgcgtgtggtatcgagccgttgcgttaatcagcaagcaataaaaaaccccacagcatcagagaccctgtgaggtttttaccttccgtttcgcaggtgccgtgtcagaccacgctgatcatctctgcactcaactgcgccgcattgaaccccaccagggtgacactgctgtcccccgccagaatcacgctgtcactgccatgctgggtcgtggcaccaagcacagcatcggcgctggcaaacagcgacttggcgaataccagcaggtcctgcccgttctggtgaatgttgaagtcgctgatcacgtcgtggccaaacccgcgttgatcgaaaacaaacaggtcgctgcccacgccaccgctgagttggtcattgcccagcccgccgatcaagacgtcattgccgctggcgccatacagcgcgtcgttgcccgtgccgcccagcagtgtgtcgttgccgtcgccgccgtgcagcaggtcgttgccagcgccaccgtcgagccggtcattgccgttctggccgaatatcaggtcgcgcgcggcggtgcctttgagggtgtcggccaattggctgccttcgatggatttggcatacgccttatcggcgccgaacaggccttcgaagtcgagtttgccactggtcaccgtataggccggcgtgaggacctcgccaatgccaccgaagagcccgccgaacacgggcacatgcccgaggctgttggccaggccggtttcgaactccacatgctctacgccgtgcaatgccttcaggccgtattggccgctgctgtcgttcagaaacaacgtgccgtcgctgagttttacggcttcgtaggaagacgaggtgcctttgaggaagactttgtcgttaccttcgccgccagcgacgatatcggtaccggtactcacgcggaaactgtcgtcgcccttgaacccgtcgaggaagtcatcgctgcgcccgtcctgcagcttgtccgaactgtcggtgcccagcaggaaggccggtgtgccgtaatggttggaggtggcggtctgtttgtcgctgacccaggtaaagctgcggctgatggcgtcgagattgctgatgatgatggtgctgtcgcgttcgatgtaatcgtagaaggtcgattgggcgatacgctggatagggttgatgaaaatgccttccagatgcgcggcccagcctgacaggttggcaattgagaacggaccattgggccaggttggcagcgcgtagatcgtgtcgaacagcacgatgttgtcagtcgtcgaagtgtaactggcgtcactgccttgaagcgcatcgataatggcgctgcccacgttggtctcttgccccgtgaggcggtggaccacatcgttttcaaaaccgaagttgaagattccgtcgctgttgctggacttgggcgactccatgccaaagtagtccgaatccttgaaaaaaccgtcggccaaagtgtccttgccgatatacatgctgttggtgacggagccaccctggctgtagccggttaccagaacatctttgccgctcaggttgtggtcggtggcgtaatccttgattgaattgagcaggtagtcatagccgttgatataagagttatcgatcatcgccggccaacccagcagatcaattggcgagttagtgccggcaatggaaaagcccattttgactaattggccgctgtcatcgtattgaccaaacactctggcctgggagccgaacacgccgtcgccggtaaaacttcctgtgatgtcggtgtggctgctatcaacctgcagttcgctcgcgccgatctcacgccagcccttgggcagtgcgaaggtgttgccctcgcccagcacaagccccggaatgttgtagagcgcgcctacggtggcaacaccgctggtgtaagtggcgagggtccaggcatctgaaatcaggacgcgggcgtcttgccccttgtaatcgaatatagccatgtcagtactccttgagcccagcgatcaacaccgaaagtcaacggtaatacctgatgcgtcgggctaaacaatatgcattgaagttgttgttgtgcattctgttcaggctgcttcgtttcttaatatcgaggttgaccattaaggaagctcgtcaacactagcctagaagcgccgccgtaaagtgaccgactatcggaaggtaagggtatgtacttagggatatagacgacaaaagcgccataagcgctgtttgtcgaacaggaagggaagttttgcgttgttcgtgactaacgagtcaaagaaaattaaacccttatagcaagttgtgaactgcaataagagttcaagaagttcaggtttctctggcgttcatgaagaataaacctcagcgccttggcatacaggctgcttgaacctgggcaattgctgccgggccagttgcgcctgcacccccgccaccgcttcaagcactctttgcgcccagtgctcatcctgcggatcaaccaccaccacgcgaaagccgtggtcgttaccttcaaggcgcacgccctcggaatcatccacgtgcaaatcaatatcgaaggccggcggaaatttcgagggggtgtttgacagcccatgcaccgtgagggcgtggttatgccgctcgctattcactacgccgtcgacacggatgccgtacagcatcagccaacgtctgatgtaggaaggcgccctacccgatgaggtatagacccagatactgcaaccctggcgccgcagctcgcgcgtcagcgaacgagtgccgatacgcagcggctctccccaccaacgatgagcacaggccggcagccaactgctctcgacgtcagcgtggtcaagctggcaagccagtgtgtcgtcgatatcaaaggagatgcgtacgcgcgggagcttggcggcacgcgtgaggaccgcttgctggacggcttgcacggctcggctggcgagtgttggataccagcgcattaatggcctccctgatagataggctgtggtatatcgctcaagaaaaacgccttgggatccggggcctgttcctccaggaaggcggcgtattttttcttgatcttgggcaattcatacaacgccttgaccccatgtttggccgagttgcggatcaccgaggaaggattgaagtaaccctcggcattttccaacgtcagcacaaacggtggcaacccggcgcgcatcagcagatagctgacgatcagcgagccactgcggttgttgccttcgatgaacaactgcggcttgctgaggatgcgcacatacacaccggccgcgcgtttccacaccgattcactgcgatacgcgcagtaccaattgaacaagtccttgataccgccttcaacgttgttgaagaagtgctcctcggtggcggccaggtgctgcgcgtattccacgcggcgcgccgggtcgctaccgcagagcacggtggcgttgatctccagcatcaagtccagatgatgaaggtcaaacaggtcaacgccccgtgcgacatagtcgtcaaccagcgcatagccttcaagcacgttgtgcagcacttcgtcggtcaaggggtcgcgcggctcggtaaattgcgtgctgagctcggcaaagcggctctgcactttacggagcgcgcgttcaatcgctgacaaatcaagacgatgcgttgcagacattggcattcctgggctgacggtggcgcacgtgtggtgtctatcgaacatggggactcagctgaacttgccgctgatgtaatcctcggtcatctgctcacgcgggctgccaaaaatctgcgcggtcgggcccatttccaccaggtagccggtacgcgtgccctgggaaatatccaccgagaaaaacgctgtggtgtccgccacgcggatggcctgctgcatgttgtgggtgaccagggcgatggtgtagtccttcttcagttccaccatcagctcctctacccggcgagtcgcaatcgggtcgagtgccgagcaaggctcatcgagcaacagcacttccggctcggtggcgatagcgcgggcgatacacaaccgttgctgctggccaccggagagcgacaggccgctgaccttgagcttgtccttgacttcatcccacagcgcagcgccttgcagggcgtgcttgacgcgatcgcccaagtcgcctttgtagcggttcaggcgcaggccgaaggcgacgttgtcgaagatgctcatggagaacgggttcggctgctggaataccatgccgatgtaacggcgcactaccaccgggtctacacccttgccgtacacgtcctgccccagaaaatgcacgtggccctcgaagcgaaagcccttcaccaaatcgttcatgcggttgaggctgcgcagtaccgtacttttgccgcagccggacgggccgataaaaccggtgatcttgtttttctcgatcggcacatggctgtcacgcaccgccatgaagttgccgtagaaaatccggtccagcttgcagtccatgaccacaggcgattgggtgacaaacggagcggctatttgcgcagttgagacgttcaagattcagatgctcccgttcttaatacttaggcttgccgaagatacggctcacaatattcacgaccagcacgatcatcaccaacaccaacgaggccgcccaggcgagctccagctggttgtcgaagggcatgccggaaaagttgtagatcaacacggcgagggaggccgtggggttcatcaccgccaagtcgccgtcgtggtagatccagtagttgctgaacagcgcggtaaacaacaacggcgcggtttcgcctgcggcacgtgccacagcaagcatcacgccggtgaggatcgcaggtaggccggtcggcaagatgatcttccagatcacctgcgagcgggtgcagcccatgccgtaagccgcgtccttcatgatcttgggcaccatgcgcatcgactcttccgccgtcagcactacgatgggcagcatcagtaccgccagggccacgccgcctgccggtgccgagtaggtgccggtggtcatcaccaccaaggcataggcaaacacgccggccaggatcgaaggcaagccggtgagcatcttggcggcaaagcgtgcagcgttggccagtttgctgtccggccccagttcggccaggaagatcgcggccatgatgcccaccggcactgcgatcgccgcagcgataccgaccatcacaaaggtgccggccatggcgttgccgaaaccaccgcccgtttcaaagccggtgggcggcaactcggtgaacacctccaggctcaggcgtgcgccgccacgggtgatcagcatgtagagcaccgaaatcagcggcacactggccagcagcgcgcccagccataccaatgtggtcaacaccaggctgcgcagcgcccggccttcgaacttgcgctgcaggctcggtacagcggttataggggatgtgagattagtcatcatcggttaccccgttgggcgtagagcatgatcatggaaccgatgacattcaccagcagcgtgatgaacatcaagacgagggcggcgtacatcaagacctccacctcgttgggcccggcttcggggaagttcagcgccaacaaggctgccaacgtgttggccggcgcgaacagcgacagggaaatgttgttggcgttgcccaccagcatcgccagcgccatggtttcgcccagcgcacggccgaggccgagtaccagggagccaaaaataccggtggcggcagacggcaccatcaccttgaggatcgcctcccaatgggtggtgcccatgccgtaggcggcctgcttggttttcatcggcacgctggtgagcgcgtcctgggacacggcggcaatcgtcggcagaatcatgatggccaataccagcgccgctggcagcaaccccggcccgctcaaggacgtgccgaaaaacgggatccaacccagttcactgttcaaccaggtagtcagtggccggatcgccgggatcaccacgtagatgccccacaggccatacaccacgctggggatggccgcgagcagttcaacgatggtgcgaaacaccgccgccagcttggccggcagaaagtcctgagtcaggaaaatcgccatgctgacaccgaaaaagcccgcaatcagcagcgcgataaaagcgctgtagagcgtgccccaaatggccggcaggatcccgtacttgccctggttaacgtcccagacactgccaaaaagcacatcgaacccgtgcttttccatgcccggcaaggccttgcgtcccacctcgaataccaaggccgcgaccaacgccagaatcagtaccaccccgattcgcgcgagcccacggaaggtgcgatcaaccaggaagtccttggcggagggaggttggcaggcagaatcccggttaaccggtacgacgaaaggtttgttcattggctaattccggaacaggggggaaacgcccccggcgcggcaaacagcccacaccgagagcggcctcacgggtgttactgaatgttggcggaggctttgcgaacctgctctaccaccgatggcggcagcgggatgtaacccatcgagtcggcgattttctgcccctcggtcaggctgtactcaaccatttcgcgcatggccttggccttggcagggttgccgttgtccttgcggaagatcatccaggtgtacgaggtgatcgggtaagacttggcaccgtccgggtccggcaaccaggccaccaggctttccggcatcttcacggcggccagggcctcggcgccgctttcagcgtttggcaccacgtactggccggccttgttctgcaactgggcgaagtcaaccttggccagtttggcgaagccgtactcgatgtagccaattgcgcctggggtctggcgtacggtggcggtcacaccatcgttcttgggcgacttgatgaatttgtcgctggccggccagttgacggtgttgccctcccccagcgccgttttgaattcagggttgatggtggccaggtgtttggtgaagaccgctgtggtgccgctggaatctgcacgcacaaccaccgtgatcggcgtgtcgctgagcttcaggtccgggttggcggcgacgatctgtgggtcgttccacttggtgatcttgcccaggaagatattggagtaaacatcacgtggcagcttgaggcccttgggattgcccggcaggttatacgccagcacgatttcaccggcggtcattggcagcaactgcacgccttcggcgaccttggcgatgtcttcgtctttcatggccgagtcactggcggcgaagtcgacggttttattcaggaagtcctgcacacctgcgccgctgcccttggattgataatccacggtgacgccagcggtcttcttgctgaaatccttgaaccaggtgaggtagataggtgcagggaagctggcgccagagccggtgaggcgcacgttttcggcggcgaaggtcacggaggaggcacacagggataccgtaatggcgagtgctgcggacttcatcaagcttttcattaaaaggaactcgttgtggtgacgggctcccgaactgtgaagcagggttgttacatttttatgaaaattgaatggcgagagggtgttttgtcctgctttgccgccgcagggctgaatttttaggacatgggttagtaacaaaataagactaagaacctgcacgcgccgcttttttggcgccttttttggacagcgtgaggtgagcttgaagacatacagctcacctcgccctgtcacaatcgggtttaaacttcagaagtgccactcaaggtggaacgtcggcgcatgcgtatcggtacccggtttattgatcgcgccatacttgtgtttccagtactcatagcccggaccgaccaatagggtatttttgcgaccccatgccagttgcccgacatcgaccatcaatgacgcgcgcaccaggctttcctcggccgtatcctgcttgaagtaatccttgcccttctcggtcttgtagctggcaaaaccctggaatttgaggggcacgccggccacctggaacgggatgccccagaccatgtgcaacacatagtacgggtcgaactggatgttttcggcctggcacgcattcaacccgcagtggttccattccatggcatacagcaggctgatatccaggtaaccgggcacgtcgaacttgagcgtcggaccggccaccaacatgcgcttgcgggtagcgaactcggtgttcttgtagttgagctcaactccgccgctcagggccacctccttgaccggaccaaaggccatcgaccgctcgaacacctggctgaggaacagttgatggcggtacactagataggcctcggtcgcacccgaatcgctgtctttctttggatcgttactgtcggacttgagtacgtccacgttgaagaaattggaaccggtctcattgccgctggcatggcccagttggtagatctccttctggaccttgccacggatgctgggttcggtgaagtcggtaccgtagcgaaaaccgatgaaggtatcgctccagtccttggcctgtgccgggcttgagatcagactcattgcacccgcggttatcaaaagagccttgcaatacgttttttgtaattgttgtacgtacatgttcaggattccatcacgtcaaagttccagccatcccggtttccaggcatgcgcaagccttgcccggacgaccaccagggccgggttcaagttgccaggggtgctatggcttagcggacgttagccatgggtatgacgagtggattgccaggcaatcatttgccagccgttattgcccgccttccacacgctgatgtagcgcgagttgaggaccatgggctcgccacggatcaccacgtccatatcgatcagcccggtaacgaccacgcattcccctaccctgcgcatctgctcgtcatggctggtgaagccgcgatagcgccagacgccctctcgcatgccctgcaggtagctgctcttgctgtcgctcttgccgtcggagtggctgtaggtcaagtctcgggtatagatactttccaggaagtccatatcgccctcgaccatggcctggcggcggcgcaattccagggtttggatctgttgttctacgcgttgctctgacatcgtttgatactccagtgttgatctcaaacttcaggaatccgtggttttcagcgcccctcccgcgcgagcgggcacgtctgactccacctggggcataaacaacagcgtgacagtggccaaggcaaaaaaaccggcgcacaccaacaggccccacgccaggctgtagtgggtggcgataccactcagcaggagaggcgcaaaagccgccaggccccggccaaagttgaagcagaagcccgcgccgagagtgcgtacccgcgtggggtacaacgcactgaagtaggaggcaaacaaactggcaaaggcatagaagaaggcatagatcggccctagccagaacagaatggcgttatcggtggtgagtgcataaatcgataacatcagcgcgctgccgagcaatgacaggagcgtggcgttgcgtttaccgatgtggtcagcgatgaagccgaaggcattgataccgataaaggcgccgatgttgaggatcgccatgaagttggccatcatcccaatgtccagtccgcgctccttgatcaagtaggtgggcaaccaagtgctcgccccccagaagccaatcaccgcaaaactcgccgccagggtacccagcagggtcaggcgcagcagttcgggggaaaatatttcgcgtatcgagacatgcttgtgctggctggggccggccatgttgcggattttctgcgcggtccattccggtgactcaggcacaaagaaaaacagatacgccagcgggatcaaggtggagatccccgccaccatgaacagggtttgccagtctggcaggtagctggccgccaccattgccgcgatggcggcgccaatcgggaatgaactcaacacgaacccgatcgctcgtgcccgttgatgggcaggccaggtttccgttacataggctgagacaatcccccacaccccgcccaagcccagcccggacagaaaccgcaggagcaggagcaagccccagttgtgtgtggtagcgaccagcgtggtcaacacgccgaacacgatcaacgagatcagcagggctttgcgtcggccgtagttgtcgcaataccaccccgtggtaatgccgctcaaaccaatccccagcaaggttgccgaggcgagcatgccagcttcattgaacgtcaggcccaggtcctggcggatcaccgggagcgcaatggtgagtaggatgatctccatggcgtcaaacagatacgcaaggaaaccgccgataagtacatgccatttggatagagctcgcattgcaggttttccttattgttgttgttttgccaggccgatcaacagacgtgatgcatcgcagcacgcttgatcggcctggaggatttacgggtgcggtcagtcagttacagcagggcgcaggcctcgtcgaagcccagccgcgggttacgggcaaagagttttgcggggtcgccatagccgaggttgcacaggaagttcgtcttgatcttcatcccggcaaaggcctgcatgccctcggcccctggagcaaagaacgtctggtcgacctgtgcgtggtcaaacccggacatcggcccgcagtcaaggcccagagcccgggccgcgagaatgaagtagccgccctgcagcgaactgttgcgaaacgcggtggactcaagcaaatccggctggtcggcaaaccagtcgcgtactgtggggttgtgcgcaaacaacctgggcaactgcgtatggaactgcgtgtcgtagccaatgattgccgtcaccggggcgcccagggtcttctcgacattgccggcgctcagggctggcagcaaacgctgccgggattgggcactgcgtaaaaacacaatgcgcgcagggcagccgttggcgctggtcgggccccagcgcatcaggtcgtagagtgccttgagggtttgatcatccaccggtttatccagccagccgttctggctacgggcctggcgaaacaacttatcgagcacctgctcgctgattacctgactcatggcatctgtcctcaactgcgtcgttgacggtctgaagtcgaccggggcaaggtctgttcagcggcacactcgccgcccaggaagaactccaccgacatcggcgggccccactggtagaggctggcgtcgcacgcctgggtgtaacccgagggcgagtcctggttgaacaggtcgccatcggtgaagtgctcgataaggttgccggacgggtcccgccaataatcgaagatctggctgcccagcatgtgccggcctaccccccagaacggcgaccaaccttgcagggtcatccactcgtggcccaggcactgcgcgtcaaaatcctgcacctcgaaggacacgtgatggacgaagtccttcggtgcctggaacagggcgatggtgtgatggtcagtccaggcgctgccacggttcaaccgcaggaaggccgcgctcgggcggtcccggtcaggctcctgaaccacaaggtccgaaggcagcatgccgagcacttgctggtaccaggccaggtgctgcggcatgtcctgcacgccaatcgccgcatgacccaggcgcaggacttgtgccgcgcccttgccgggccgctgcacatcgccaaagcgttgcttgtgatgggccgagttgagggtcaacgcagcacgctggggcagcgtgcccacggcttcgataccgtgggccagctcgatgcgccgccccgagggatcatgcaaggcgacgtactgccctcctccggggccttccagcggccggatcgccgaggcccccggcaaccgggtagcctgatgcaagtcatcgaggctttcgacggcgaacgcgatggcgccaaagctggcttcaacagccttctcggcgatgtacacatagggcagtgagcaggtaccgcgaaaatacaggcgttgctcggtacggtgcataaccaccaggccgaaatcggtcaggaaacgttcgaccactccaaggtcgggatgacggtagagcacatggttgatgtctttgatctgcagcacggtagttgctcctgggcattcaatgggcaggacaaccggtggtcaaaaccagggcagccgggatcgctgcccaccgtagtgacggtgggtcggttgtgctgcgcgctcgaaaaaactgaggcgtggactcaggccgctgaaggctcgtcggcgatcaggttgctcaaggtgccaaggccttcgatctccacggtgcagaggtcgccaggcttcatgaacagtggcggacgtcgcgcccagccaatccctgccggggtgccggtgacgatcacgtcaccgggttccagggtcaccgcttcactgagcacggcgatcagttcggcgaccccaaagatcatgtcggcggtattgccctgctgcaccaccgtgccattgaggcgggtcaccaggttgaggccgactgcccccgctggcagttcgtctgcactgacgaaggtcggaccaaacgcgccagtggcgtcgaagttcttgccaatggtccattgcggcgatttgaactggtaatcgcgaaccgaggcttcattgaagatcgcgtagcccgccacatgctccagggcctgcgcgcgcgcgatatgccggccaccggtgccgatcactaccgccagctctccttcgtagtccagttgttcggagacacgcgggcgcaggatgggttcgccatggccgatcaggctggtgctgaaacgcggaaaaaaggtcggataggtcggctgttcataagggctttccttggtgtgatcggcgtaattcaggccgacacacacaatcttgcccgggcgctccagcgggggcaggtaacgcagcttcgatggatcgagcaaacgggcgtcgctcaagcgctgatgggccgcttgcagcgcgttcggaccggccttgagcaagctctccagggcacccggataaccactttcctgttcggtcaaacctcgcagcgcgcctgctttttcaatggccagacctttggtggagccttccaaaaagtgtacgaaacgcatgatcactacctctgttgttgttatagttcggtacggtacgttaccgtacccttttgtcgaaaatgcgcccaaataaataactcgtcaagggtcatcaaagtgtttttacaaaaaacattccggggcaatcgcttgattcgtccctctgcgcggctggaaggcttgtgcagagcggcgtaggctaggagaacttttgaattgttcttttcaggaatagccgagccacatgcaaacccctaccccgaggcaagcagcaaagcgtcaaagtattctccaggctgcgactgatatgtttctcgcagaaggctattcaggggtcagtgttgacgggatcatcgccaacattggcggctccaaacgcacgctctatgcctacttcggcggcaaggaagggttgttcgccgcgattatcgaacaactgtgcgcagaaaacgtcagcccgctgactcacatgaccctcgctcagaagcctctacaggaggcactgacgaccattgcacgggtctttctcgatgtggtgctgtcgcctcgcaccctggccctgcatcgcctaatcgtgtccgaggccctgcgcgcgccggaggctgcaaagtcgttcttcgaggctgcccccgcaacggcctatagctgcctggccgattactttacctgggccgaggaagccgggctggtcatgccgggcaactcgcagacccgcgcgaagatcttccttgatgcgctgaccggcgacatgcagttgcgctgcctgctcgggcttagctcatgccctggaaaagccgcgcgcgagcacctgatcagtgagaccacagcgattttcatcaacgggttgtcaactgacaggcactagaacccatgaaggtaacgtagcgtcaattgggtgccctgcgcgcggttttcagcgccactttcaaaatacagattggcgaagaatgtctggcttccctgctggtacatcacccctggcccgatccctgtcacctgttccctggagtcacgctggcgatgcccatcaatgcggtcatcgctgatctgattgagttgatagcctgcaacgccgatacgccacttctcggcaacggcataagaaaccgacaggttgctatgaaacgcctctcccggctggatactgccggcttgcaggactgacgccggatcgttattgcggcttgaccacgcataattgaaacgaccactgacctccaggcggtcagtcaactcccaggtgaacacgtaatgggggttgaacacccagacattgctcccggtattgaggctcgaatctttgttataggaacccgtcggcaaggagaacacgaaattcaagcgctgccagtacgggcggccgaagaacgacaccggggcccactgcaacagaaacggactgacgatcatgtcaccctggcgagtccgtcgtcccttggggccctgatcgatctctatctccaggttcaccagtggcaatagcacttcggcgccatagttcgctcccagcagagtcttgtcgctgaagtaagccaggtgcggcagtaccgtggtgctgtgcacctgctgccgccccggcaacgcatgtccatgggcatcgtaggccgagttgctgcggtaatactgcaccggtaactcgaacaacgcaccggggccggcgaccccatccatgaaactggcattgcccagggccagaggaggcaggctgatgctgtcagcctcgctcgtggcgcaggccagtgccgagctgatgcccagcacccgaatccattgggtttgactcatacaacaccttcattgaataacgactagaaaacactgaatgggtaatcgacaatcacccggtactcatcggcgtttgaattgccacgggtgttgcccggtgcggtatacccctgtgccgaacggtgtgcggcccagcgcaaggtgatattcaagcctttggccttgccgtctggcacggcatagcgcagggcaacgtcccgctcccaatggtgtgcatctttgccggcggcgttatagatgtagccgtagcccgtgctattgggatcgacccgggtcaggtccgcttcaccgcgagtgtatgaagtgctgagctggaaatccggcgcgttgataaacgccaggctggtctggtattgaatcttccaggacttttcgccaggtgcattgaagtctgcgtattgctgggagttgcccaggtaaaggaaggtccggtcgtcctggaccatgtagtcgaacggcgtgtcgccgtccaccttctgcagccccagggtcaggctctggcctgcgccggacagcgtcaggccaccgctataagtgttgttgtcgatatggcccaactggcgctggccctgatcgcgggttttgaagtaacgcaggtacggtgtcagcgtaagcccaggcgtcagcttgaatggctggctgaccccggcgtagtactggttccagatatcactcaattggccgccatacagggtcactgttattgcgccgggcaccgcgtagacgccgcccagccaactcatggacgcgctttcacgatcagcggccaccccagccttgttgccggtgccgtaactggtggtcaagtggctttggccgctctggttgcgctggcgtgttgagtcgatccagccagtgtccagtgtcaggtgttccaggctgtagttcttgagcgtggcaccacgaaatgtctggggaaagactcggctgacgccactggcgatcagcgggttttctaggtactgatcacctgcctgcatcaggctgtcaaacccgcgcaacttgagcgccgcgcccgcagccgagaagtcagactccgacgcgccttttgggtccagcggcagcaagccggccccgccgctgccccctcctccatccagcttgagcccataaaaaccatgcacgtcgagcccgacaccaatgggtgtgtcggtgtatcccgaacgaaaggacaagtacacgccctgcacccattcgcgctggtcacgcctggacggtgtgttgtgattatcgcggcccaggtagtaattgcgcagcaagccgttaagagacgagccgctgacaaatcccggcgtgaccgacagctcagccttttggcgctcattgataccggtgctgaggttatctctctggtccatggagttatcggcataggcccctgtcgccgacaacgagacagtcagcgagattgagacccttataagccggcgcaatgacacactcatcagcgttgctcctgttgttcaagcaccgtcaccgtcgccgtagtgcctgcgcgcaagcggtccttggcggcataggcaggatcgatcctgattcttacggggacccgctgggccagcttgacccaggtgtagctggggttgatgttggccagcaagcgactgccaggcgcgttctcccggtcggtgatggcgaaggcgatgctctgcacggttccgctaaaggtctcgccgctcatcaactggatccgcactgggttaccttgtgcgatacgcggtaacttggtttcctcaaagtagccactgacataaaacgaatcgctgtccaccaacgccagcaaggcaccgccggcactggcgtaatcgccctggcgggtcagcaggttggtcacataaccactgacgggtgccaccacccgggtgcgctgcaggtcgagttcggcctgggtcaaggcagcctttgccagctgcacattggcttgggccagccccaggttggcctggttgctgagcaactgcgcctgagcgatagccacgtcggtattggacttctcccactcctcaccggagatggcgaacccttgtttgaggctacgccggcgccgctcttcactttggcgctgtttgagctgcgcctggctggcaataattgcagcctccgactggcccattgcggcctgggccacttcaacagagcgtcgtgcgtgctcgactgccagggcatagcgcgccgggtcgatttgcagtagcaggtcccctttgctcacatgctggttatcctgaacccgcaaactggcgatcagcccggagacgtccgccgacaaggtcaccacatcagcgcgcaccctggcatcgcgagtccagggtgaacgggtgtagtgctcccaggcgaaccagcccaggaccagcgccagcaagacaaccgccagggtaatcagttgggcgatgtattttttcaaggtgacgaggctcccattactagaatcacaacagcacacacgcagacatagagcgcgccttcgaacagcgcctcatgccacacaaaccgcagcacgcccagccgacgcaaggaccagcccagcaccatgaaaatcggcagcgccagcaacaaagcctgcgcaatgggcggcaggtagacgccacctacctcaaaatcaatgtgcaagagacggcactcctttttcatcgagctcaagaaattcgcggtagcgctcaataaacgaggcaacgatcagcagtgccactcgaatgcgaaacaccgaccagagctgttcatgcccggacgaaagctcagcggcatgcagttggtccaggtcatcgcccaggtgccgcaatgcatcggtcaatgcctgccagtcgacggtgggccttcccgccacataacggcctgactggtccagaaccgactgcaaacgggcctgggtttgcgccgtcagcaatgtattgttctgcccttgttgcttgagctggttcaacgccacgcccagggccatgcaggccagagtgacctcgaacagcgcatgggctcgcgggtctttggtcgcgggcaacaaacccagcatcatggtcaggcgatccatcatccggctttcaaaggcgaactgctgctgatccgtcgctgaggtcttgagcaatacgtagacctgctcccggctctcatcgaacagacggtgaatgcgccgggccggattgaatggaaacacccaggagtacaccagtaacgacaaggtgcaagctccgatataggcaccggcaaattcgaaccactgactcgcggtgttttgccaggccccgatattctgcgggcccaccatcaggaaggtcgaaagccccaggcccatgcctatccccgcagtcagtgggctggccaggcccacagcaatcacatagagcaacggcgccagaatcaacagcagcatttcgacgtcgccaatggcgggcaccagcatgaactgatagaccgctgaaatcaccagcgacaggccaaacccacgtgcgtagttctggcttgccgccaagggccgtggaaaggtcgccatcaatgagcacagaattcccaccaggatcatccctgcccgggcgccatcccaagccgtttcgatccagatcaatccacacacaagcaaggcaataaacgcacgggcagcgttcattcccgccaggcgccagtccaggtacagcggattacttcggctctggcggtgcaggcagttggccggacggccctcctgaatggcatcactcagttgcaggatctcttccagttgttgcaacagcctggcctgctcccaacgcaaggcccacgccagcgcgcgtaacgtacctgttatgggctcatcacgttgctcaaccttattggcctgctggtcaaagcgctgctgcaacacgctaaagcgctggcgcgcctgcgtcgataatgaacgccccgccactgccaactcatccaggaacgcgagttcgtcagcgcgcagctgttgaatgtcttcgggaagctcaccttgccaacgctcatcgatcagcgtgcgttgacgacgcagcactgtcagacgtgaagtcagcaataccaattgattacccagcagttgcaccaggccgttggcactgcgcaaccgtggcgcatcgaaatacaaatgccggcgcaggccttccagtgcgttgatttctccgagtaactgcatctggcgcttacggaaatcggcctcgctctcctcggtacgaatcaccgccgccgcatgggccgccatcaatttcaggacttgatctactttggcaaagtacccccgggcgaccgcttccgggcgcgccgtcaacaggctgaccacgccgacacaggcaaccgccaacagcgtctcagtgagtcgggtgatcgccagcatcaaggtattatcctgctccggtacagcaagcagcccaacgacgaccgccgtgaacccgctgagcacaaaggcgtgggaactggtgtagcgcagcaacgtgccacccgccgtgcagaacgccaaccacagcgacaaggtaacaatgaatgggaccggtgcctgggggaaaacgcccatgatcagcaccgccactgccgcgccgaccagggtgccgataatctgtgaaaaactacgctgcaacgccatgccacccaagggttggctgacgataatcaccgccatcactgaccattttggctggtctaggtcgaagatgaaggccaggtacaaggtcaacaatccagctgcaacggtgcgcaacgcaaatagcagcgcgcccatacctggattgaacaccactttgaaatagttgatcaggggctgcataaacggctcaagcgggctgccaaggcctgcggaccgagacacaacctttggtcaaaagctgcgcccaattcataacaggtcgttagctggaaaccggttcatgctcatctgaacgcacctggtgctaggttgaaatgaggactgcctgtcgcagcacagcccccatgctcgggcttacttgccttcagtcaaggcgttgtagctggtgaacaggttgcggtagtccggaatgtggttggagaacaacgtccccaagccctcgatgtcgttgcgccagtcgcggtgcagctcacaggccaggccaaaccaggtcatcagttgcgcgccgttggccgacatgcgggcccaggcggactgctgggtcagttcgttgaaagtgccggaggcgtcggtgaccacgaacacttcaaagccttcggccagggccgacagcgccgggaacgccacgcacacttcggtcacgacgccggcaatgatcaattgtttcttgccggtggccttgatggccttgacgaagtcttcgttgtcccaggcattgatctggcctgggcgcgcaatgtacggcgcatccgggaacagtgccttgagctcgggcaccagcgggccattggggccggtttcgaaactggtggtgaggatggtcggcagcttgaagtacttggccaagtcagccagggccagcacgttgttcttgaatttgtccgggtcgatgtcacggactagtgacagcaagccggcctgatggtcgaccaacagcacagcggcgttgtctttgtccaagcgaacgtaaggtgtagacatcgtggtactcctgataaagaaggtgacgccccgagtaggcgccccgtaaagaacccagcgtgtttacttgcgctgtgagtctagtacttcgtggttgtttgccacttcctgagccttgacgtagctctcgatgagaagctggtagtgcggcatggcctgggtgtagacgttggcccactcctgggcatccgggcggttccaggagccttgcaactccgacagcgtgcccatgatgtcgatcggcaccacgccggcctgggccaggcgtgcaacggtcaggtcggtggccagcctggagtggttgcccgaggcatcgaccaccgcgaacaccttgtagccttcatgcaccgccgcaatcgatgggaacgccaggcacacgctggtcagggtgccggcgatcaccagggtcttcttgccggtggctttgacggcggcatgaaactccgggttgtcccacgcgttgatttcgccacggcgggccacgtactgggcgtgcggcgcggcttcgtggatttccgggatcaacgggccgttgggtccttgcggcaccgaagcggtggtgataaccggtattttcagcagggttgcggccttggccagcgcgatggcgttggcgcgcaattgaggaacatcaatgtccttgacgatctggaacagaccactctggtggtcgatcagcaacatggcggtgtcagcggggtcaatcgtcggcttttgaccattgaagtttgcagcgttacctgatgcagtcatttgcatttcctcttgcttggcgatacctccctggcgtgtgcgccggaactgcgcccggccgtgcctgcacttcctgtacagacacgcttgggcaacgacctggacgtgtgtcagcaggcccacccaaaaaaacagtggaaccaccttaatcatcgcgttcagggttaggtagtggctgaaacgggccgctccatctcaaaaatggaacaatgcagccgcacggtggcaagggcacttggacgtgccggtcgttacaatgcgatcatcggctccatcccgtggatttcaggcacttgcgccaatcatgaccgttcacttatttccaggcaggtgccttcatggacatcaaacaacttaaattcctgatcgcgctggagcagacccgccatttcggccaggccgccgcccgctgcaacatcacccagcccaccctgtcgatgcgcctgcgcaacctggaggaagaactgggcctggaactggtgacccgcggccaacgcttcgaaggcttcacccaggccggcgaacgcgtgctggcctgggccaggactttactcgccgcccacgacggcctgttcgccgaagccgctgcgtgtcgcggccagttagtcggtaacctgcgcctgggcctggtgcccctgagcggcttcaacccgatcagcttcatccagggcttgtcccacagcttcccggaactcaagttcagcctcacctccatgagttcggacaaaatcatcgaagccctgggcaccaaccagttggacctcggcgtgtgctacctggaccacgtcagccccaactacctggagtttttcgaactgggcgaaacccgtgtcgggctgctgtacgacacccgccacttccacttcgaaggcacccagatgagctgggaagaagccgccgaactgcctctggggatgatcagcaatggcatgcactaccgaaaatccatcgacctgagtttccgcagccgcggtctcgatccccagccgattctggaaagcgactccacctatcaactgttccaggccattcacgaaggcttctgctgcgcgatcatgccgttggacagcggcctggaaagcccgattgagaacctggcgtttatccacctgccggatgccagcgtccttgcccccctgggcatggtgatgcgcaagaccgaaccgcgctcggccatcgcagaaaaatgctttgccgaggccaggcagttgtttgcgcccaatacccaggcttagcgggcctgggtttgcagcgcacacaaaaaaggcgctccgcagagcgccttttttaccgccgattgttttactgcaagctgacctgacgcagttcaggtttggcctcgccaccaatcatgatgcgttttggcttggcctcttcaggcacttcacgcagcaggtcgatgttgagcaaaccgttggtcagggatgcgccacgtacttcgatatggtccgccaagcggaacgacaaccggaacgcacgttgggcaatgccctggtgcaggtaagcgaccttatcgtcggtttcgcgtttaccgccagaaaccgtcaatacacccctctcgacctggatatccagatcctcctcggtcaggccagccacggcgatgacaatgcggtacgcgtcgtcaccgtgcttttccacattgtgaggtggataggaattcggagcctcgctgcgcagcgccgactcgaacaggtcattgaagcgatcaaagcccaccgattgacggaacagtggggccaacgacagggtagtagccattttaaaatctcctgagtttctccaagtgatttagtacgcgacccggattcggcatcgcgtgatcaaaaatttatggacgcgcaaaaggaattcaagagggttgataaaaattttcttgcgcaaggggcgaacaccgaaaccctagtgcggcggcctgtgctctaatcacattgccaggcgtgctttaacccgtgagcgcctgagacagcccttgaggtacaaaaaaatgaaaatgacattcccggccctggcattgggcatcctgatctcccaaggcgccctggccgctggagatggtaccgccgcgctgggcggcggtgtaggcggcgtgttgggcaatgtggtcggccaacagctcggtggctcgaccggtgcagccatcggtgcaggcgtaggtggcgcagccgggagtgcggtgggtgcgcaaaaaggtaataaaaccgaagcggcgattggcggcggtttgggctcggcgggcggctcgctgattggtaatcgcctgggcggtagcaccgggtccaccattggcgcgggcgtgggcggcgcagccggcggcgcgttgggtaacaacctggccgatgacgagagcggtcatcgctcaagtggtggcaagcacaaaggcaacaagcataagcacaagaacaagcaccactgatcgtctggtttaccctgtaggagcgagcttgctcgcgaaaaactcacagacgccgcgtttattcaggaagcacgcgttatcgttnnnnnnnnnnnnnnnnnnnnnnnnnnnnnnnnnnnnnnnnccgaagttcaacgcagtgatttgcgtgcccttacccgccggcagttcgtgaaccatgatcaacaagccgggatgctcgacatccggcaccaggatctgccggctggcggcgatgtcgtaggcgcggcgcacggcgaggattttttgcagttgggaggcaaaggactctggatcctgcagttggctgttcaggctgccatacaggcttttggagcgcggcatttgccccgccgacagctcggcgtcggggttcaggtccaccagatcataggcgccacggtggatccagcgcgtgtcgccatcggccatcaggtgcgccacgtcttcggccgccaacggcagtgcgcccaccaggtcccagccggacaaggcaaacaccccaggttgcatggcgttgtacatcaccagcagcaagtggatctggcgaatctgctggatatccgccggggtgatcgcctccaggtcacgaatacccagagctgcggtgatgatactggcggtggtgcaggacacgccgttggtcacgaacttgaggttatagggcgcatgttcgccggtcaggcgttcgtacatctgctcgcggatatgctcgcgcaggatgttgccggggaaggtctgcccctggaacatgaagctgtcgtgggcgtgcagcgtccagaagtgcaccagttccagggtcagttcatcgtggttctgtagcgcgtggatcagcgatcctgggtcgatacccagcgtgtgcatctggcgcagcatcaggcgcagaaattctgtgtcgcccatcaacaacgcgtgctggtaggcaggccgggtgatgaaatcataggacaggtcggcgccgccatgggacatggaggcgatgtcgtccacagtcaggttgagttcctggaaactgaaaccaccggccttgcgaatcgccccgccgagcaactggttgccggtgatcgacagcgggtggctttccgaccaggccgtaccgtccaacttgcgctctacaccgagaaacccgttggcgtccaggcgcaggatcttcgcgcccatcacatcaatggcgtgcagcgcgtcgccgatgatcatctgctgagccgcgaacgagggatccagccaattgagcgacggctggccttccttgaagtaatgcaggtacacccaacgccgtggtttgccgtctacgccgaccacttgcggcgtggcgctccagtcagtttcctttacccccggctcgaagaagatcacccgctgcaactggccgacgatgtagtgcttgtcgcgcagcgcatccacctcttgcgggctgaggttctgtgcatcgcggccttcggcgacatccggcagcaacgaccagtcttcctcacggatttccaccatatggtagagccccggatagtcctcataggccatctcagccaggcgaaagtccgcgcccttgccggtatgggacgggatcacgtcgtcgatgatcaccgcattgtgcgcggcggccatgcgcgtcaatgcctgtaactgcgcctcggtgcccagttgcgggtcgatgtcgaagctgatgcggtcgaaattgccgtcgatggtcggcgtgtgctcggtaccagacaagccaccggacttcttcaacgggccattgtgaatgccctggataccgattttggacagggtatgccacagggtttcgtcccccaacgcttccagcacggtgccgccttcgcgggtgataatcgacgcggggtaggcagtgaaccacacggacgacaaggctgaagcgtcacgcggccgggtctgtgcatagggctgctgccacaagcgcccttgccccgaatagagcttggcccgctgccgcgctgcgtggagcatggaatgttgcaccagccagttcacatgatcgttattcgccgcggtcataagctcggtacctgtcgtggtgaaaagggtcggtgtaagcatatgaggggcgtgggcgccattcgttgcatcgcaatagaacgcttaccctgtaggagcgcgcttgctcgcgaaaaacccacaggcgccgcgttgattcaggacgcccgcgttatcgttgaggtttttcgcgagcaagctcgctcctacagaagacattcacctgcgctgccgccttgcgtggcttgccggtactgcctcggggtgaacccggtagaagacttgaactgccgggtaaacgcactgtggtcggtatacccgcattgcagcgccacctcggtaatcggaaactcggtatgcagcaaccgccgggcatgttccagccggactttctggatcatttgccggggcgtgaggtggaacacgcgcttgcagtagcgttccagttgcgccacggaaatcccggcgatgcgggtcaattcacccagggtgacgcggcggttgaagtggctgcggatgtgttcgtccaccgccgccaggcgctgataggccgggtgggtttcgctggctgattgcaggtctaccgagatcccggccaggccgatgatcgcaccgagccggttgtacagcggccacttgtgggtcaggcaccagccgggttcgcgggtgccgtagaggtgcaattcgagttggtcttccaacaccaggccctgcctcagcacacgacggtcctgttcggtatagccggggcccaattgggcgggaaacacttcggcgctggtcttgcccagcagcggttgcagctgcttgaggccgcagcgttgcaccagggtacggttggcgagcacgtagcgggcgtcgatgtccttgatgaaaatcgcggcattgggcagtacatcaagcatcggcagcaactgctctaccccactcaataactgctcgatgctgtggggtcggctgccctggaaaaggctcgcgaacgcgctctgcaacatgactttatctgcccttttatcgtcgacagccagcagattgcgccatggggcgagcgctgtcgagcgcggcaaattgtgctgaattcgtcatccatcgccgcataaaacatcaatcctcagccaggcctgtgggttcaggatagcgccactgcatgcctatccaataactcacaagaaggcgccgctatgtcaggccaaggcaagttcaagaaacagctgtcactgatggacctcacctttatcgggttgggggccatcttcggttcgggttggttgttcgccgccagccacgtgtctgccatcgcaggcccggcgggaattttttcctggttgctcggtggtttcgccgtgctgctgctgggcattgtctactgcgaactcggcgccgccctgccccgcgccggtggcgtggtgcgctacccggtgtactcccatggcccgctgctgggctacctgatgggctttatcacgctgatcgcgttttccagcctggtggcgattgaagtggtcgcctcgcgccagtatgcggcagcctggtttccccagctgaccaaggccggctccagcgacccgaccaccctgggctggctggtgcaatttgccttgctgtgcctgttctttgtgctcaattaccgcagcgtgaagacctttgccatcgccaataacctggtgagcgtgttcaagttcatcgtgccgttgctggtgatcggcgtgctgttcaccttcttcaagcctgcgaacttccaggtgcatggctttgcaccgttcggcttgtcgggcatcgagatggccgtgtccgcaggcggggtgatctttgcctatctggggctcacgccgatcatttcggtggccagcgaagtgaaaaatccacagcgcaccatccccatcgccctgatcctctcggtcctgctgtcgaccgccatttatgtgctgctgcaaaccgcgttcctcggcggcgtgcctaccgaaatgctcgccaatggctgggccggcatcagcaaggaactggccctgccctatcgcgatatcgccctggcgctgggcgtgggctggctggcctacctggtggtggccgatgcggtgatctcccccagcggctgcggcaatatctacatgaacgccaccccgcgcgtggtgtatggctgggcgcagaccggcaccttcttcaaggtcttcacgcgcatcgatgaaaagtccggcatcccgcgcccggcgctgtggctgacctttgggctgtcggtgttctggaccttgccgttcccgtcctgggaagcgctgatcaacgtggtgtccgcagccctaatcctcagttatgccgtggccccggtgacggtcgccgccctgcgccgcaatgcacccgacatggcgcgcccgtttcgggtcaagggcatggcggtgctgggcccgctgtccttcatcatcgctgcgctgatcgtgtactggtcgggctggagcacggtgtcctggctgctgggcctgcaaatcctgatgtttgtggtgtacctgttgtgtgcacgctgggtgccgaccgcgcacctgaacctcaagcaacaagtgcgctcttcggcctggctgatcggcttctacgccgtgaccatcctgctctccaaactcggcagctttggcggcatcggtgtgatcagccacccgtttgacaccctggtggtggcggcctgcgccctgggcatctactactggggcgccgccaccggcgtgcccgcccatttggtgcgcctggagcaggaagaggatgaaagcgaagccgtcagcgacgcgcactacagcgccccactgtccccgaccacccactgatggagcgccttatgaaacggctgcacgtgattgactcgcacaccggcggtgaacctacgcgcctggtcatgagcggtttccccgcgctggttggcgacacgatcgccggccaactggaacacctgcgcacccaccacgatcaatggcgccgcgcctgcctgctggagccacggggcaacgatgtactggtgggcgcgctgtactgcgcgcccgtcacgccgggggcgacctgcggggtgatcttcttcaacaacgccggctacctgggcatgtgcggccacggcaccatcggcctggttgcctcgctgcaccacctggggctgatccaaccgggcgtgcacagcctcgatacgccggtcggcccggtcgcggccaccttgcacgacgacggcagcgtgaccctgcgcaatgtgcccgcttaccgctatcgcaaacaggtgccggttgaggtgcctgggcacggcgtggtgctgggcgacatcgcttggggcggcaactggttcttcctggtgtcggaccacggccatgagttgcagatggataacgtggaggccctgaccgactacacctgggcgatgctcaaggccctcgaagcccaaggcatccgtggcgcagacggtgcgctgatcgaccatatcgaactgttcgccgacgacgcccacgccgacagccgcaactttgtgatgtgccctggcaaagcctatgaccgctccccctgcggcaccggcaccagcgccaagctcgcctgcctggccgccgacgcaaaactcgccgcaggagaaccctgggtacaagccagcatcaccggcagccaattcctcggccgctatgagtgggacggcgaacgcgtacgccccttcatcaccggccgcgcctacatgaccgccgacggcaccctgctgatcgacgaacaagacccgtttgcctggggcatctgagcccttgatcaattcaactgaaaccggagttagcaccatgagcgacaacatcttcaccggctgcatgcccgccctgatgaccccttgcaccgccgagcgccaaccagacttcgacgccctcgtcgccaagggccgcgagctgatcgacatcggcatgagtgccgtggtgtattgcggttccatgggcgactggccgctactcaccgaggcccagcgccaggaaggcgtggcgcgcctggtggcggcgggtgtgccaaccatcgtcggcaccggtgcggtgaacagccgtgaagccgtatcccacgcagcccatgccgccaaagtcggcgcccatggtttgatggtgattccccgcgtgctgtcccgaggtgcttcggtcactgcgcaaaaggcccactttgcagcgatcctcaacgccgcccccaacctgccggcggtgatctacaacagcccctactacggtttcgccacccgcgccgacctgttcttcgaactgcgtcgcgaacacccgaacctgatcggcttcaaggagttcggcggcgccgccgacctgcgctacgccgccgaaaacatcacctcccaggatgatgatgtgaccctgatggtcggcgtcgatacccaagtggtccacggcttcgtcaactgcaacgccaccggcgccattaccggcatcggcaatgcactaccactcgaagtgctgcaactggtagccctgagcaaaaaggcagccaagggcgatgccaaggcgcgtcgccaggcccgcgaattggaagctgcgctagcggtgttgtcatcgttcgacgagggctgcgacctggtgctgtattacaagcatttgatggtgctcaacggcgaccagggttacgccctgcacttcaacgaaaccgacgcgctcagcgcggcccagcgccgctatgccgagcagcaatacgcgctgttccgccagtggtatgccaactggtcggcagaacagaacgccgcttgattctttgtaggagcgagcttgctcgcgaagaacgttaacgataacgcgctcaccctgaacgaacgcgttgtaggcacgtttttcgcgagcaagctcgctcctacaacacctcttttgttttccaggatttcaccatgactctgacaggcaagctgctgatcggtcagcaatccatatccggccatcgcgatgcgatccgcgcgatcaatcccgccaccaacgccccactggaacccgcctacgctggcggggatgagcagcacgtagaacaggcctgcgcactcgcgtgggccgcgtttgacgcttaccgcgaaacccccttggcagatcgcgccacgttgcttgaaacgatcgccacccacatcgaagccttgggtgatgagctggtcgaacgcgcctgcgccgaaaccggcttgcctcgcgcacgcattgaaggtgaacgcggccgtacctgcgggcaactgcgcgcttttgcgcgcaccgtgcgcctgggcgaatggctcgacgtgcgcgtcgataccgcacagccccagcgcctacctctgccccgcgccgacctgcgccagcgccatatcgctctgggcccggtggcggtgttcggtgccagcaacttccctctggcgttctccgtggcgggcggcgataccgcgtcggcccttgccgccggttgcccggtgatcgtcaaggcccataacgcccaccccggcaccagcgaactggtgggccgcgccatcgccagagcggtaaaacactgcggcttgccggagggtgtgttttcactgctctatggtgcgggtaacgaggtgggtatcgcactggtgagcgacccgcgcatcaaggctgtgggctttaccggttcgcgcagtggcggcattgccctctgccaagcggcgcaggcacgcccggagccgatcccggtgtacgcggaaatgagctcgatcaacccggtatacctgtttcctgctgcacttgaaactaggtgcgaagccttggccgaagggttcatggcgtcgctgacccaaggcgccggccagttctgcaccaaccctggcctggtgatcgccctgcaaggcgccgctctggaccattttatccagtccgccagtgagcggctctcgcgttgcccgtcccagaccatgctcacaccgggtattttcagcgcctatgaaaccggcgtgaaggccctggcccagcacgccaacatcgccgccaagggcatgccagcgaccgggccgaacctgggccaggcccatctgttcgtgacccaggccgaggcgttcctgaacaacgaacagctgcaatccgaagtattcggcgccgcctcgctggtggtggcatgccgcgatgtcgagcacatgcgccaggtgtccgaacacctggaaggccaactcaccgccaccctgcagatggatgactcagacctgccacacgcacgggcactgctgccggtgctggagcgcaaggctgggcgtctgctggtgaacggctggccgactggtgtagaagtgtgcgacgccatggtgcatggcggtccctttccggcgacttcggacgcacgcagcacctcggtgggcacggcggctattctgcggttcctgcgcccggtgtgttatcaggatttcccggacgccttgctgcccgccgccctacagcacgacaacccgctgcggttgcggcgcctgctcgacggccaacgagaagcataaccatggccgatcccaatcaagcagacatcgtagtggtcggcgccggcattatcggcgtcgcctgcgccttgcagttggcacgccagggtcgccaagtcgtggtggtcgacgcccaggcacccggcatgggcgcctcctacggcaacgcgggccacctggcgacggagcaagtcttccccatcgccgacctgtcaatcctcaagcgcttgcccgccatgctcctggaccccatgggcccactgcgcctggactgggcctacctgccccgcgccctgccctggtttatccgcctgctgttgaacctgcggccagcgcgttatcagcgcaccgtggccggccttcgcgcgctgaatgaaggcagcctgggcgcgtggcaacgcttgctgcaatcgattggacaagctcaattgctgcgtgaagacggttcgctattggtgtttgagcgcgccgaatcccgcgctgcactggatgcagtgcagcaacgcatgaggcagcaaggcgtcgccgtggagtcctggagcggcgatgcggtgcgcaaggctgcgccgcaactgagcgacgccatacaaggcggtttgttcttcccggctaccggacactttctggacccgtacacggtggttggcgaactggtgaacgcagccaaggccgagggggtgcaatttcttcagcagcgggttctggatgcgcgcctggagggcagcggcgtttccctgatgaccgaccaaggcgtaatgacagcgcagcaagtgctgatcgcctgcggcgcccattcggccaaactcaccgccgcactcaccggcaaacaggtgccactggacaccgaacgcggttaccacctgatgctgccccacgaacaacagcgactgcccttcgcggtcacttcgctggagcgcaaattcatcatgacgcccatgaccggtggcctgcgcctggccggcacggtcgaattcgccggcctcgaccgcccggccaatatgcaacgcgcctggcagctgcaccggttgagcaaagggctgttccgacacgacttgagccacagcgaagccacaccctggatggggtttcgcccttccctgcccgactcgctgccaatcattgaccgggtgtgcgagggcaaggtactgcttgcgttcggtcaccagcatctggggctgacacaagcagcggtgacggccgagagggttgggcagcttgcggcgggtgagcgtgtgccagaattacagccttatcggctggatcgtttctgaaaacaccgaaaaccaaatgtgggctacttgaccaaccgcttctccttggaggggcgatagccgaaataagcgctgtagcatttgctgaaatggctcggcgagacaaacccgcacgccaccagcacatccacctgggataactcggtgtgctgcaacaggcgtcgcgcttcagtgacgcgcagttccatgtagtagcgttgcggcgtggtgcccagctgttctttgaacaggcgttccaactggcggcgggaacggccggcgtagacggcgagttgatcgagttccagaggctcttcgaggttggcgtccatcaacttcaccacctcgcgcaacggcgcgctgacacacatgttttcggtgggtttgatgcggcggtagcgcgactcttcgaacgccaggatatcttcgatgccttcaaccaaggctttgccatgcaggctcttgatccagtccaaggccatatggaaagcccccgaggggctggacgcagtgaggcggtcgcggtcgatgacgtagggttcgctggtgacctgcgccgccttggacacttcggccagtgccggccgatgctcgggatggatggcacagcgataaccctgcagcagccccgcacgcccgaggaaccacgagccgttccacaaaccggcgaggcgcacgcccgcttcacccgcactgcgcagccattggacaaatggctcgctggccttgagttcggtgcgaaaaccaccgcagatcaccaacaggtccaagtcctgcaagctcgccagcatcaggttcgcatccgggcgaatgatcaggcccaagtcgctgatgacttcgccctcgccccacccgaaagtgcgcgtagcgaacagatcagggcgcaacaggttggcggtcaccagcgtgtcgagggtctgggtgaaggccggcaaggagaagtgttcgagcagcaaaaaaccgacacgggtgaccgaggttgattgctgggggttatcactgaggtagcgcaggttcttgccttgcatgccaccgctgaactggcgtctttccatcgagggtcggcccacgcttattgttgtgcagtgggggctatcttaggggcaaatgcagtgcctgtctcaggtgacgctcaaggcgggcagcggccattgcactgatcttgataaaaactgttcgcttcaaaagccacggcccaggcgctgcgcggtgatctgatacggttttttcttttcgatctgcgcctgtattgaaaaccgcttgaggcggacaatagccccatcccgacactcctgtcgtccccttcccctcggaggccttatgaccaagatggcgattttcctgtttggctttttggtgttgaccattggtatcggtatgttggcgaccatctcaccggtctaagcccgcgctacttcccctgtggcgagggagcttgctcccatgacggcctcatacccgacgcttatctacctgacgccccacgatccaactgtgggagctggcttgctcgcgaaggcggcctggcaggcgacactgttataccgagtacatatccattccagcggtaacggctacttggggttccgctctgacagcgggtcactttggaaaagccggaatgccggcccagcccaaagtaaccaaagggctcttgccccacccctcggcacctcgcttgggctcggtgtgcccgtaatccgccagtgatttggggggccgccgccacgcgccatccatggcgcggggcggctaaaccggcatccctgccggtttaccccccaaatccctgtcgaattccggccagcggggtttaacggggcgcctgagatcaagatcacaagcagagcaagatcaagagcgactcgcttcgcatcgtggttacctatgccacctcagcccacaaacagcatcggatacagcgacagcaccaacagcccggccatggaccagttgaacatccgcaaccagcgcggctcacgcagcaagttgcgcaagccgctgccacaccccacccacacgcacacactcggcaggttgaccactgcaaataccagggcgatcaccagtacattagtcacataaccctcggccggcgtgtaggtagtgatcgcccccagcgccataatccacgctttggggttgacccactggaaggccgccgcaccgaggaaggtcatcggcttgccatgttcatccgggttatcagacatgccgcccgcattggcaatcttccacgccaggtataacaaatacgcggcgccgacataccgcaacagcgtgtaggcccacgggaacaccttgaacacctcgcccaagcccagccccacacaaatcaccaacagcataaagccaatgctgatccccagcgcatggggcatcgaacggcgaaagccgaaattcacgcctgaggccagcaacatggtgttgttgggccctggggtgatcgaagaaacaaaagcgaacagcacgaaggctgataacaggctggtagacatgatcatggcgcggcatccaagcggtggtgatgtgcctgcgacagtagtgggttatggcgcgctgcgccccgtacagctaggggtggatcgaggcatacacttgcacagccttcatcgagaagttgcgcttaccgaggcgcatcgggaatcggtgtgggaacctgccacgccggttttttgccctcctgactgtcgaaaatacgccgagccttgcgaaagtcctccacgttttccaccacccaggtccagataggcgacatgcgaatcaaaagctctcggcccaggggcgtcagctcgtactcgacgcggggcggaatctcaccgaactcgcgccgaaccaacaaaccatcgcgctccatggcgcgtagagttttggtcaacatgcgctgagtcacacctgtcatctgccgttttatctcggcatgacgcatcgcaccgtacacacccaaggcatgcaaaatgcccagtgaccagcggctaccggcgtgagccaggacttcacgcctgacgccatcgtcttcttccctgagcgactggcagataacttctgcctggctgagcgtttcatgatcggtcatttctacccctggtatcacccgtgtgccttcttatgagcgctgccgaatcgtgccagcatgaactcatcttatcgccaacaggtctgcggagaaatcatgcctgaaatgaccccacttccctctcaatcgatccttgttctaggcgccggcgagctcggcctgccggttttgcgcaatctggcgcgtgaggccaaacgcgcgcccggctccaccctcagcgtgttgctaagggagtcgaccatcaacacgcaagtgcccgaaaaaaaggtagagatcgatgagctgcgcggcctgggcattcagatggtcgccgcagacctggtgaacgactcaatcgatcaacttgccaaggtcttcgcacgcttcgataccgtgatcggctgcgcgggcatggtcgcgggccgcgaaaccccgatgaagctggcgaccgccgcgctcaagtccggcgtgaagcgctacttcccgtggcagttcggcgtggatttcgaagtgattggccggggcagcccccaggatctgttcgatgctcagctcgatgtgcgcgagttgctgcgcgcccaggacaacactgaatgggtcatcatctcgacaggcatgttcaccagcttcctgttcgagccggtgttcgaggtcgtcgacttcgacaacaacacagtcaacgccctgggcagtctggagaatagcgtgacgctcaccacgccagacgacatcggcacgctgacagcgcaaatcgtgttcttcgaaccgcgcctgcgcaatcagattgtctacctggccggcgacaccgtgacgtatgggcaggttgcgagcatgctggagcgtgttctggatcgttcgttcaagcgcaacgtgtggacggttgactacctcatgcaggcactggagcaagaccccacacaccacatcaagaagtaccgtgccgtattcgcacaaggcaaaggtgtggcctggcctaaggcggccaccttcaacgagcaacagtcgattccggtcaccactgccgagcagtgggctcgggaaaaccttgcagacctttgaaagccggattctgaggccagccgtaaaggctggcacaggtgaagggacggttagcggctttgagcttcacgctgctggccagaggcatgttgtttttttacattcttgcgcgacctgagctcgtattgatggtgaataaaccaggcgatcaacaacaacccagtgacgccaaaaaccaagaccaacagctctagcgcagtaccttcatgtgaaaacatttttcgttcctcgtcctgaagccgtatgaccgaaaaaacagccacaccgaaattgtttgtaataattcaaacattttcagggtagtcggcaaatcctcaggtgacaaccccgatcgggctataacccttgatctagacgtgtcactcgtcgaaaaacgggtaaatcacagccaataaaaaaccccgtagacgctaatctacggggtttgcgcgagcttacttgctgccagaagcgtcctgctcgaccaccatatccagcacgtagacagtcgaaggggcatccgctggcggattcttccattcgtactgcttgacccgcaacacagtgcgcaagccgtcatgatgcacaaagccttcgataggctggtacagcggatgccaggtgtcttgggtcgccagttgcaggcccgcgtcgtcatagcgacgctcacgcacttgcaggcactgataatctggaatcaaaggatggctgcacttgaccgtcttggccgccacttccagaaacttgacctcaccctcgctgccatagcgggtctgcggggtggcctcgccttgcaacttgagcaccgagccgtctgctgtcgtcagttgcagcatcggcgccctgttatcgccggtgatcacagcgcgcagatcgcccttgaacagccgccctacctgggcgtcaaggtccatcaggctcttgtcacaggccatcagcgtagaggccagtggctgaaccttcagaaccccgtcctgatagtgatagccgccgaactgacgattgcagccgccgctgatgctcaggttcttgtcaccgaaggcgacacgcaacttgcgctcgatgcctttgttcatcgccatgagaggcttgcccgacgcatccgttgccgagaccaggttccagtcgtaagcagataaggttggctgggctacagcggctgaggtagttggcatcgaaggtgattcttcatggcttttggaaggggcggcacagccttggatgagtgcagcacacacggctacaagaagaattttttgtttcatggttcactctgtcagctttgatgagtgcgggcgttattctgcgctggcaggataagcgcgcggctaaaacggcgtgaggaggtcgtttgaggctttaatgagcgtagacccaatgcgcgcttggcggacctcgtccttggccgatagcaatcggacatcatttgcttcgatcagtttcacgcaatgaggtcggtggcggtattgctaaatcccaggcaataaaaaaccccgtagacgttaacctacggggtttctaagagtggaggccgaggtcggaatcgaaccggcgtaggcggatttgcaatccgctgcataaccattttgctactcggcctcaaacgatcaatgcccttgttgctgacattcaccgcatacaaacatgagtgggctatgtgaagcgtgcctctactctaactcattgaatacattgaagtttttaatgcttcgttgcgttcgatgggcgccattatgtactcatttgcctaggcctgcaaccccttgatttcaaaaaatattctgccttggcatcaatgggttgcgcgtctgccctactccttcaccgtgtggatttggtagtgcgggtcggccttgatctgggcctcggtgaagggcaatgggcgcagttttttctcggagaaggcttgggtctggtcctttgagtaggcggacgccgggttgctggactcggagaaagcgagtacgccgactgcgttggggcctttgtcgtcgaaggtgacgatttgcaggtagctggtgccgctgacgacttcgcgtttgccgtcggcgcggggcacggtttgcatggcgttgtagatgccgagctcttgcgggccgccgtggatgggggtttggccggaaacttggatgtcgccccagcgggtctggcccagtttgccgacctctgcgctggaggccagcatggcttcgcgcagggctttggcgaccggggcacggtcgatggcgaggccacttggggtggtcagggggtgggccgggtcgaaggccacgcgccaggcgtcggggatttgctgcaggtgttgcatcaggttgatgaagtgtaccaggcccacgccgctgtcgaggttggcgcgctggtcccagtttttcaggctggtgcaaagtggttgcagtgcagcggcgtcggccccgaggtgtttggcgcagaacgtcagcagatcgggcatgacttggcccgccaggtacacctcgttgtccatgaccatgtgttgcaggtcggtgacgctgatcggctgtttctcaagggtttgcaggcgctggagcgcgaagcgcgcacgcgggccgaggccgatgttgtcctggctgatcaccggagagaagccgctcaggggcgccttggggttggccatccatgccgagtcgttggagtgctgcacgtagtcggtgcgttgcagttggggcaactggtcggccggaaagataccgggctgggccgcgcgcgggtcgatgtcccaggcgcaggcgctatgggcgccgtcgagcacgatcatttgcaacccggcccgtgggtcgctgcaggttgccagcttggcggcactgacgttgggcaccaccgacaggttcatgtacaggctctggccctggtcatcggcggccagggtgttgacccaggggatgccttgcagggtgtgcaccgaggtttgcaattccttgaggctgccggcgcggttcatggcgtaccactgttgcagcacccggtcgttgcccaggttggcgtcgcgcaggctgaaggcgtagcggcggtcccagtcgagcttgccgggccattgcaccacggggccgaactgtgaactgtagacggtgtgggtcacggccttgaggctgccgtcggcttgcttgacctgtaccgttaccgccgttttatccagggggatggacttgccgtccagcaggtaacgggtggcgtccttggggtcgagggtcaggcggtacagggtgaaatgtttggacgtgtccacggtatgggtccacgccacatgctggttgaagccgatgttcaccacgggcaaccctggcagtgcggcgcccattacatccaactggccagggatggtcaggtgcatctggtaaaaacgcatgccgcccacccaagggaaatgcgggttggccagcagcatgccacggccattgaaggagcggtcacggcccacggcaacggcattgctgcctcggtccagggtaaagcgttgctggttggctgcggccagtgcaaaggctttggcgctggattgcatgccggcggtggcttggggtggtgctgccccggccaaggcttcggcgaattggccgacgcccccttccaccaatagcctacgggtcaacttgaccaggtcttccttcaccaagggccgtacccacgcggcctggcactgcgcgggggcgccctgctcctttagataacgattgtagccagccacgtacccttcgatgcgctgctgcatcgctggcgtctgggctttccagaaggccgccacggcctcgggtgtattcagccagttgaagaacacatcgctggcgaggttgttgcgctcctccagggtcgcttggtccggcccgaaaaacctggcgcgctgaccattgaccgtgatcacctcattggccaacaggcacaggttgtcctgggcataggcgtagcccatacccacccccaggccacgctcatcaacggcgcgaatatgcggcacgccataactggtacggcggatatccgccgacgcctgcgtcatttgttcccgtgccgatgcggccaggctcagccccagcaacagccctgccacgcccactctggacaacccgttggaaataatcacgccgactccacagtcaaattgaacaccctcacaagggatggttaccccaccgtaagaacgcacatcgaccggaataatttagccgcacacggctgtatatcgtcagcgcttgaaaagtgacaaacccgataccgacaaattttctacatccgccgtttcatgatttgcgtcactcgttcgtcttattactcaagagcaccatctttttcctgatcaggctctgaaaaggagtttttgcatgtataaccctcaagtgcccacggatggacattcaaaggccacagatactcactttggcaaaggcacacaggcgttcggcaacgcgcccgaacagcagggcaaccagcgcatccgccatttgctcaagtgtttcggtttgcgcaccagcctcatccggctgaaggtcatcgacgccctcctcaccgccgccgacaaccagcgcaccctaggggtccgcggcgtgcacagccacttgctggagctgggcattccgttgtcgtttctcagcgtgcgcgaggtgctcaagcgtctgtgcagcgagggcgtgatcaccctgaacgctgacaagagctacagcctccatgaagaggctgccaaggtccttgaaagccgtgcctgactgatgcccgtcagaagttaggcttgaccttgcggcgcatgatgccgttgatcaccacgacgaccacggcaatcgcgatcgccaggtactggaaggttttttcgctgatcacgcctatgttttgcagataagacaggccaaacatcgcgcccagtaccgccagggcaatcagaagcgaatatttcaagcgttgcttttgggtcatgacaagttcctgaaccttaagaatgtaaccacggtgtatcgccgtacaggccaggcacatacccgcgtacggggatggcgcgaggtcggcagcatcgtatgttacaggcgatgaaaatttttggcttgtcctgcgacatcggtcgtacatattcatttacagcatcgctcgggctggattcggaaccttccgacaccttcaaaccaattattcgaggcccaactaaggaagaatcatccctcgaactatcatcaggacgcgtgggccaaagccattggactagcccacttgattataggtatcactcaccctcgcccgcgtcgtgacgtctccaccgaagaaaccgctcatgcatctgaggtccacggcccttcccttcctgaggtggaggccattgcaccagtcagcgcgaatcgctctgacctgatcaagggcctgcaaataactgatcaacgcctgttgctcaatcaataccagcaactcaatcaggacatccaggcactgctgctacgccagccgacgctcagcagcgttatcgagcagcaactcgcccgcagtttaggcattgcgccgcccgtggacgtctcgtcgctgtatgtacaccgctatcacaccgatgagcagggccagcgcaagttggtctcggtagaaggcatcaccgaggcgctattcaatgcgttgcgccaactcaagacatctccggacgctgagccctcgaccagtatcgtcggcatggaagtcggcttttaccgcagcgactcgccaagcgaaagcacccagcaattgcagactcgcgacaccctgctttcaattgcacaagccatcgaaaaagaactgcccctgagcctcgcccgattctggaccgagccacgcacgggcgaccccaaccctgagtcaccccaaaacgagttgttgggtatccaccgcgagatgctttccaccctggcagccttgggagtggaggacggcgctttgacgcctgccgccaaatcgttgatcgacaaggcgctcgagtatccgaccctggaggctcgggaaagcgcgatgagagatggagaacggcctggtgtgtacccgctcaagctcgaggtaccaagccccgccggcagcctgctggcgggcgccttcctgatcaccagcagcgacggggcgtcagcggcacgcccattcaatagcgcgcaaaccgaccgcaccttgtcacctggccaacagcacgggctgacagtgctctacaccccccgcgatggctatgaaacattcgaaagcccgaccaaggcacttgcggcgctgcgtcaacgtatcaacgacgatcccgatgccgcagagcaattgttactgagcctgccaatagaggttcaacaaggcctgaagggtgactggaaaaatcaattgagccagaacctctccccggtagaggccgacgttatcgccgcaggcgtgccgcagttgctggcgcgtcagcgccaacaggtggtcagcgcactgcaagcgctgtatgaccggcaaagcgtcgaaccggaactggtcgacccctggcgacacctattgactgaggcggacgtgcatcacgccgctgacctggggccgcatttcgacggcagcagcgctctggaggctcgtgagcaatggctggacagcccatcacgcagcattgacgcacgccaggcgctggatcaaaacctggggaatcaaaaaaactggcgctacctggcgcaaaaactcaacgagtccgcccaggccttgtcagacacccccacagagcgcgacgtgtcggccattctgaaaaaaacaccgatgaatatcgcgccagactccgcccattaccaagcctatataagggtacctggcctgtccgtaagccttgaagccttcatcactgaacatggcttgccattgcccaagaccagggatgaactgctggcattggcgcaaaccgcaaaagcgcgagcacagcaacaccccttgggcaatttcagtggaggcttgtcctggccgatcccgctggacgccggccaacaacagacgctgcgcatggccgccgtcgagcatgtgcacagcgatcctgagttaccacaggagatccccaagcgcggcatactggaacatctgggcagaaacctgcatctctccgagcagacactggaggacccggtcaaggtgctcgaaaccctgatcagctccaaggatggccaggcgctgggccaggccatgcaaaccaaaatgaatggcattgccacggactccagcgcaaacgactacgcactggcggcaattcaattgctgctagaccccgaatccttgacagcgccccaacgaaaccatgtggcgggtttcgacctggcagacaaaaaacattggggccaacggctgtcgactatcgtctacagcctgcgccaacacctgattgatacagggcgcgaatcaccggaattggcaggggcggctgcacacctgttactcagccgcgcagccccgcatttgctggtcaagaacatccctgactccgtggtgtacggcagcaccgcgtgggcaaacctgtgcatggcggcggcagccattgaagccaaaaccccaggccgggttgccactatgtcgtttgccgaagtgatgatcaccgccgacacagcaggcgccgcccccgcctctgcgcaagccgcaacgatgttggactgggcagtggccaatgacattctcccggccaaggacgatgcgctgtaccagccagccgacctggataaagcccagacgttgttcaaagctcaactcgataaactgatggaagcctcgtcgctaatcggcgggagtttcccaagccgtaaacagatggcgctggacctgctgctgaagacattcggccccggcatggacttcgagctcaagattttttccaaatacaatggcgatacaccctccaatccgcgatcactgctggaaatcgtcatggaagaacgggtcatggacggtcgctgggaactcaccaaagaaaataccggtgtggatctcaatgcgataattgccttcaccaaaggtgcgtcattcaatattcagcgcgcgtttgaggatgccttttcaaccgccttggacaaccataagaccgtctagaaaacgtccatcctcaacgcactcagcaatctgccgcccgaagatagaaaaaacctcacccaaggcaaactcaattactttcaagaaaaaagctacagggtcagctggatgcccttcaaaggggaaaccttgtttcataccagcccgaccatactggtgaccgcgcaacacaacgggcaaacaaccacctatgagttcgacaccgtaaacggcgttgtccgaagtctgggcaagagaaaaacaccgaaagcccccgaagcgtttgccaatgagttgatcagggaggagccattctatccagacagagccaatgccaaacgcgttgacggctggcaaacactgctcgattttctcccgaacaaacccgtgccggtttcgcgaatcgacctcagtgatttcaaggaaagtgaacttgatcgcgaacagccctccaccgctgagcagccttatatgctcatcaacccccgcagtcatcatattgccgactcggtgatcaaggcattggaactggataacccagccatcaagaaagccgccgcgggaaccacgacctttgaaagcaaccaagaaatactgacccacgtcacagagtttttcctcaaccttattcccttccgttctgcaatcgtcaacttcatggagggcaactatggggaaggcatcacggacgtcgcctttgacgttttcggttttgtcactgctggcgtaggcatggcggccaagattggcaaagtgctgggtactgctggatctgcggtcagcaaggcgctcaaggtcacgaaaatcatggtgccgtctctgctcaaggagctgaacccgttaaacggcgtgggcgatctgctaaaaggcgcgggcaaaaccatttacgaaggcacagaagcgatagccggcctggtgggctccctcaagggtaccgcaaaccgcgaagcgctgatcagcgccgcaagccgctatgaggcggccgcaacgggcacttttaaagtcagcgggaacagtgtcgagggcatggcggtcaagcgggatgggcgttggtatgcatacgatgcgcataaacagaaagctttcggtgcacctcaggatttcgatccggtgcatacactgatgccaccctcaccccgcgcggacttctccccccgtgggcaagtgagcgctcgtcaaaacagccgatttcacccctacaaaaaatccatcgaaaaaacgccgaacatcgatgcaagaacgccaacaacaccagtgatcgtaaacaaaaccgatcatctggactccatcaaagaagaatacgtcgtacacattaaaggccgtcccaacgaaggccatttcacaccgagccggaggaaaccgacagaacaacgattcgaagcagaaatgaatgacttccatcaaaaactggaccctttagacccaccgaaccgccccacgattccggaaacgaaaccctacgagaaagtgcccgacctgattgaaaaagccttggacaattcggatgtggtgatatttggggagagccaccagcatctggccatgttccgcgaaattgacgcgagcatagagctgttcaaacgcaaaaatgtgaaggtggtcggcattgagggtgtcgtctatgacaaccgtggattactcaaggacgatggcatgggccatacaggccccaacctgagaccggctcaccctcaatacaatctgcaaacgctgatcaaaaaattccaggacgccggaatagaagtcgtaccactcgatcacttttatctgacgcgtcaccgacatgaccggaatgcttacacgaagctaagcacaacccaacgaaacctgaaaagactcaaggagtttaactactacgcggcacgcgtcattgaacaacacaaacacaaaggcaaagtggtcgccctggtaggacgccagcacatcaacaccactcaaggcgtcaccggcctggctgaggcgaccggagggatcggtatcggtgtttacgaacgaacaggcatgaaggtgggctacggcacgaactccaaggatattaaaccggggccgatgggcaccctgaacgctgacaacgatctggcgggagacctgcaaatctattcgccagcaacctgacaacacgttaaatagttgcctgcgcagcacgcaggcaacgatcaaaatcatcagccgccatgcacccaccgctggtgcacccaacgcgcaaacgcatccagtgcaaaccccagcaacccgatgaccactaccatcgccatcaactccgagtacgccagacgatcgcgggtatcaaggatgtaataccccaggcccgcgctgaccccgagcatttcgcagggcaccagcacgatccacagaataccgatggccaggcgcacgccggtcagcacatgccccaccacgccaggaatgaccacccgacgcaatgtttcccaacgcgtggcgctcaagctcttgctcagttgcaaccagcgcgggtcgagctgacgcacgccggctgcggtgttgagcatgatcggccagacagccgcgaaggccagcaggaagtagataggctggtcgcccacgcccatgagcatcaccacgataggcatccacgacagtggcgaaatcatccgcagaaactggaacgccggcgttgtcgccgcctccaggttacgcgaactgcccaccagcaacccgaggggtactcccactaacaacgcgagaaacaacccgacaaaaatacgcttcaagctgacggcgatgtgcaggtacaactcactgcgtccgagcaattcccacaggctgctcgcggtggccgccagggaaaagcgcgccgacaggccatcggcctcgccaaagactttcacgcccagccaccacagcaccaacaaccccgccaagccactcagccccagccaccagccggggattctgctgttgttcaaacgccgatctcctcgtgccgctcatagccgtccggcaaaccgaaggtctgcatgccgcccacggcttcgatcgccttgcgcacgaaacggtcgtccaccaggtccttggcgacgaaggctgggtccaggtctgcgagaaactttttatcgccttcgatcaaggtgtccttcaagcgccgcaccagttcttcggtgtagctggggaacgggtacggttggaagtcgatgcgatgctcgtcccagttggcgtgctggattgctccgtcggcaacatagccggcgcggtcgctggccgcaggcgccaggactttgctcaacaccggctcggcatggggcgtgtagcggttcgggccatccttggacagcagctttaccgcctcttcgcggttgtcgcgggtccacacctgggccttgacgatggcgttcacgaccttttgcgaccactgcggacggttggtcaggtcgtgttcgtgcatgaacaccacgcagcaggcatggttgcgccacacgtcgccggtaaagcgctgcacgcgaccgacgttgaggttttctgccaaggcgttgaacggttcggcgacgatgtagccgtcgatgcgtttgctggccagggccggaggcatgtccgagggcggcaacacgatcaggttgacctcattggcggcaatcgaactgccggtggcacgagtgacaggcgtgaggccgttgtcacgaaacagttgctgcaccaccacgttatggatcgagtaccagaacggaatcgccactgacttgccgcccagttgcttcacgtcggtaatgcctggggatacggtcaagcccgaaccgcccacatggttccacgccacgactttagccggcaccttactgccgtagcgcgcccatacggtcatgggtgacagcaggtgtatcacgttgacctggccggagataaacgcctcgatcacctgggcccagctgcgcaacaacaccgggcgctcggccttgatgccttcggcttcgaacaggccgttgttgtgggccaccagcagtggcgtggcgtcagtgataggcaaatagccgatgcgtaccggcgcatcgggctcgttggcggcacgggcttgcaggctgctcaacaacggcaaggcgccggcggcactgagcaccgccgacagcttgagaaagtcacggcgcgagtgggtcaagtcatccagacacatagttaatctcctgttgttcaagggggttgggttgagggcggctcgcctgccgtaaggttttcagaatatcgatacgcagtgcgccgatggcctcgacctgttcttcccgagggtgtggcaagtcgataacccactcacccaacgtccgcgccgggcggttacccagtagcaggatgcggtccgacaataacagcgcttcgtcgatgtcgtgggtgatcaagacggccgccgagccttgctcacgattgaccttgagcaacaggtgctgcatatcggcgcgagtcacttcatccagcgcgccgaagggttcgtcgagcagcaacacttgcggctgacgcgccaggcagcgagccaatgccgtgcgctgggccataccaccggacaattgcgccgggaactgctggcgcgcaggttccagccctaccgccgcaatggcgtggtcgacacgccggcggcgctcttcaacactcaagtgcggttggcgggcgaaatccaggccgaaggcaacgttcttttccagggtcagccaaggcagcaggctcgggtcttgaaaggccaccaccacgcgcggatgcgggccgctcaatggttcgcccaacacctgcacgcggccagcctgaggtgcctgcaagccggccagcacccgcagcaggctggatttgcccacgccgctggggcccaggatcgacaccacttcacccggttgcaagtgcaagtcgaagccttgcagcaccggcccgctgccataccccaggcaaataccctgggccgtcaataccggcaggctcatagattggcctggcgatgcagctcggtacgcagttgcaccaggctgggcgttacgatcggcacaaaggccgactcgcgccagcgccgggcaaagccgctgccgtgggcggtcaaataggccttgccaccgctggcttgcagttcaagctgcacggcgctggcggcggtttcagccaaggcgatgcgcagcttgaacagcggtatgggctcggcggtaaaacgcccggccaacagcccgtttttaagctcgctgaccagatgatccagggtcacgcgcagggcttccaactcttcgcgcagcacagtgcgactggcacccaaatggtgagccacttcggctagcgaacgccgggccaagccaatcgacatgccgcactgcaagcccaggaacgccgggcgtaccgccggtaaaaacttgcgcgcatcctcgtgcagcaaccactcgcgactcagctccacgccttccaggccaagcgctgcggtgttgctcgattgcagcccgagcagctccaggtcgcgtgaacgctgtaacccggccaccgaatccggaatcgccaggataaacggcgcgccgccgcccgcatgctcgatggccgctgcagcgacaaagccattcttgcgcaagttggtcacccaatgcaggcgaccgttaagtgtccaaccgtggtcgttgggctcggcgctgatctgcaacgtctcgatacccgacagaaacttcatcgcattcgacagcccggtggcgccggccaacttgccgctgagcaggtctggcatcagttgctcgcgcaggcgctgattggggctctgcagcaagtactcgataaacgagcgctggccccagcacacaaacgccgccgccagggaatggctggccacattggcgatggcctcgaccgcccccgccacatcaccgcccaggccgcccaattgagtgggcacaccgattttcagaatattggcttctgccagccgcggcagcacttcctgtggatcgcaactgcccacgtccagggcctgcgcttgaacatcgagccaacggctcaagattgggtcaagcattcatgtctctccttttacagcaggtgggccaacgccgaatcagttgaccggtttttcccaacggtattgcgccagttccgggttcagcggggtgcgggcaaacacgttagcgaagttgcacagggttgccaggctgacacccaggatgacttccaacgcgtggccgtcggtgtagccggcagcgcggaatgcctcaaagcccgcgtcactcacatccccacgggtggcaatcacttcacgggtaaaggcagcgagtgtctcatagcgcgcgtcgggcaactcaccgcggcggcgcaaggcctcgatcacctcctctggcaacttggctttattgcgggcaaccgccgtgtggccggcgacgcagaaatcacacccgtggctggtggcggcaatcaattgcaccacttcacggtcggccaggctcagttctgccttggcattcaagccggagacggtgatgtaggtttccagcgcggcgggtgcgttggccagtacccccagcaggttaggaataaaacccgagcctttgagcgcgttttccaggaagggtttggccgcttgcggggcggtttcaggcgtgagcaacggtacacgggacatggagtggtctcctgttgggtttgaatgccccagtctgttggttctaaaaaaagcgctcaataggctaaagtagcgattacttgctcttgagtctttccattagatgaattcgtccgatgttcttgtcgattggttattagatagcctcgaactcaacaccagtttgtttcacgtcggccgctattgcggtgactggcacgcgagcacccatggcctggcacaggcgagcttccacttgatcgtgcagggcgaatgctggctgcatatcgacggcgatccaacgccccaacacctgaataatggtgacgcggtgtttctgctgcgtgattttgcctttcggctgtccgggcacgccacggcggcaggcgcccaagagtgcccacgccggcagatgctgcccctcgacagcacggccacggacggtgtgggattagtctgcggtttctttcacttccaatccggcttgtcgacgctgattgtcgacaccctgcccagctggatcatcctgcgcgctggcgacccgtcgcttgcggctgcacgcaatcttttcgagttgatcctgcaagaatgcgcacgtacgccagcgccctcttccgcgctgcttgaacgcctttgccacctgttgttcctatacgtgttgcgccagcaagtgatcgacaataccgagcttggcggcctggccgcattgggtcgggcaccggcgttcgcgcctttgctggagcaattgatcgcacacccggccgagccctggagcctggaaagcatggcggcccgtaccgggttgtcgcgctcggcattttttaaacggttcagtgaattgtgcgggcagtcacctgggcaagtgctgctgatgatccgtatgcgtcacgcctgtgaactgctcaaggcggaccagaccgtggccgaggtgtccctcgcagccgggtatcaatcggtggcggcgtttacccgagccttccacaaggtcaccgggcaacagccaggggcctatcgcagggcgcaagcctagcgttgtaaacccgtgccgggccgcgcgcataattgcaccagccaatcgacgaacacccgcacccgctgcgacaactgccgatggggtgggtataacgcggtcagcgccatttccggcactgccacatcggccagtacctgcactagcgtgccctcggccagttgacgcagggcgtgatatcgaggcgcctggatcagcccatatccggcttcgcacgcagcgaagtaaccggcggaactgttcacggcaaccaccttcgacaggttgaccgggcgcaactcgctgcccagcacaaattccaggccaaaccgtttgccgctggcactggaaatgtactcgaccatttggtgaccagccagctgttccaggctgctgggcgtgcccatgcgttcaaggtacgcggggctggccagcgtcagttgttccatcattgccaagggtcgtgccaccagcgattcatccaaggccggaccaccgcgcaacacacaatcgacgccttcgcgaatcaaatccactggccgatcattgaggccgatctccaactcgatctgtgggtacaacgcggtgaacgttggcaaagccggaatcacaatcaagctcccaatgcctgagggcatatcgatgctcaatgtgccacgggggttctggcgccgcgtggagaacaccgcctcggtttcctcaagatcagtcagcaattgcacgcaacgttggtagtacgccgcgccatccagggtcgggctgacgtggcgcgtggtgcgctgcagcagttgcacgccgagatgggcctccagttgcttgatcagaattgtcacggaggcgcgtggcaattgcaggctgtcggcggccttggcaaacccgcccaattcaacaatccgagtgaacacgcgcatggcgttaaaacggtccaaaagaatgctcctgcgggagattgtttagatattacgaacagtgatagcacttttagcgggtttatctgcattttttcaagggtaacaatgggcccctcatcacaaggagcttccctatgcacactcgacaactcggtaaaaacggcccgcatgtgtctgccattggccttggctgcatgggcatgaccgatttctacacgcccgtcgccgataccaccgaagccaccgcaaccttgcaccgcgccctggagctgggcgtcaacttcctcgataccgctgacatgtacggcccgcacaccaatgagcaactgatcggcaaggccattgccggcaagcgcgaccaggtgttcctggccagcaaattcgggatcgtgcgcgaccctgccaaccccgtagtgcgcggggtgaatggccggcccgactatatccgcaatgccatcgacggcaccttgcaacgcctgggggtggatacgctggacctgtactaccagcaccgcatcgaccccgacgtggccatcgaagaaaccgtcggcgccatggccgacctggtgaaacagggcaaggtgcgctatctgggcctgagcgaggcatccgccgctaccctggagcgtgcgcataaggtccatcccatcagcgccctgcaaagtgaatattcgctgtggagccgtgaccagcaagacaacggctgcctcgctgcctgccagcgcctgggcatcgcgtttgtgccgtacagcccgttgggccgaggttttctcaccggtgccttgaaaagcccggatgatttcggcgcagacgactacaggcgccacagcccgcgctttcagggtgaaaactttgcaaaaaacctgcggctggtagaacaggtgcaggccctggcggcagaaaaaggtgtgacggccgggcaactggcactggcctgggtattggcccagggtgactacatcattcctatccccgggaccaagcggcgtgcgtatctgcaagagaatgtcgcggcggtatcgatcactctcagcaaggacgaactagctgggctggatgcgatcttcccggccgatgcaaccgccggtttgcgctaccccaaggaagtgatgaccatgctggatatctgattgccccgaggggcgcattaaaggttggcacaaataccttgacgcaaatgcgcccccgcccgcaggaaccctttgggccgatcctccacgcaagagtagtcatgacgcactgtcagacttttatgatcaacccgaaggacacctgatgctattacccctcactcatgcagcagtcccccatcactccacggtttctaccgaaccgcagcagtccaagccgacaccctatgacccaccctcagacttgcagctgggcgtgccgaatatcaggacgcatctgctgcttgaaaaaagtgatgtgaccttcagtcgggaaatcacctggagcacctggaaccccgaaaaaccgaagatcgcaactaatcggctcatagtagaaaccggtaatggcgccgacgaaatccacgtgcgcggttggccgggcgacaagctgcagttcatcatcaacggcagaccgtatgtgcttgacgccaaagcactacaaggcccggatcagagccttttgatcaaaaccaatggcggcgatgacagagtcatagtcgatgatgacgtcaagcacctcctggaagtagagggtggcgccggaaacgacttcatccaggccggcggtggcatgtccggactctttggcggcggtggccacgataccctgctcttgggtagcaactctggctatgccgaaggcaacgacggagacgacctgatcatcggcgcaagcggcaacacccttatgtttggtaacgcgggcaacgaccgactctatgcagggtttggcaacgcacataaacagaacctgctcgacggtggcgacggcgacgacaaactgtatgccggaagcgggaacaactatctgaaaggcggcaagggcgatgacctgctgacagggcatgaccgtacgtccttctacaccggcgaagataacgaccgcatcgccaatcatcagcccacagacagcattcacacacgcgtcaatgatcattggacgctcgcccaaggcacggtcttgaatgaggcgaaaccgggcaaagccggcgagcagccaagttaaccaacggtcgcaatgctcccgtgcaaagcgcgggagtcagactattctcacagctcctagtgtaaaaaccgccacacaggaggtgtgtcatgcacgcgactgagcattcggtccgcttggagcagatcagtcaggagcgcttcatccaggcgccgatcgaggcggtttacgactatgtcacccaacccgaccgctggcacgagtggcaccccacctcccttagcgccgacaccggcaccaccggctcattgccggtcggcacgcgctttaccgaaatcatcgacctgctgggcatacgcgtccccatgagttaccgcgtacaaatcgcccgccgccccagcgagttcaaagccgtgttcacctccctggcggttgatggttccattcattactacttgcgcgctcatcaggacggcaccctgttcaagcgggtgctgacttacgagaccgaactgcaactggcgtctttgcacgagcgcatggtcgaactgtccgcgatcgcgctggaccggctcaagcagcggctggaaaatcagggtttcgtataatttagaaacattaccacgacgtcagattgcaaacatgcctgcaaaagcagggagaatgcccggcttattgccgcgccttcagtgagacccacgatgaaaaccccattgcgattggccctgctcagtgccctgtttaccaccaccctggcccaggccgccgaactgatccccatcgatgtacaccgcgacgccaactgcggctgctgcaagaagtggatcagccacttggagagcaacggtttcaaggtcaacgaccacattgaagccgacatgagcgcggtgaaacaacgcctgggcgtggcgccacgccttggctcctgccacaccgcggtgatcgacggcaagttcgtcgaaggccacatacccgccgagcaggtcctggctctgcgcaagcgcaacgacctgctgggacttgccgcaccgggcatgccattgggctcgccaggcatggaagtagacggacgcagcgaggcgtatcaaatcattggcctgacccgcgacggcgaagacgtggtggtagcggactacccggctcactgatcggtgttgatggggtacctcgggctgttcgtcgcggcatttggcgccgctacgttattgcccctgcaatcggaagccgtgttggtgggcctgctgctcagcgggcattacaacctttggctgctgctgggtatcgccaccctgggtaacgtgctgggctcgctggtcaattggctgctggggcgctcggtggagcgcttcaaggaacggcgctggttccctgtcagcgccaggcaactggacaaggctcgcagccattatgcgcgctgggggcattggacattgttgctcagttgggtgccgattattggtgacccgctgacgttagtggctggggtgatgcgcgagccgttgtggcggttcttattggtcgtgagtatggccaaaggcgcgcgttattttgcgctggtcctgttgactctgatgtgagactcgaagcatcaggccgcaccgtttgtcgccactgtcaattctgacagctagacccccccccttcaagcgtctgatttccttgaaccgcggctgtcgaggccctattcgaggagttcatccatgtccaagctaccatcgcccgatgaccactttcccgttgcttgcaaaccatcagcgtttatcaacgatctcgacccgccgatctattccaacccgatactcgacgtagtgggagctgacagaggcctgggcctgcggcatgtcgacccttacctgctggtcacgctttctcgctggaccggtttgcaagaaggcgatacgtacgagtactaccacggcagtcgaacagtggctctggcttcagacttcgtcagacccggtgaaacaggcaacagcttttttcggctggctatcgaacaagagcgcgtcccgcaagactcctcctttccggtgttcgtgcgggttgtgcgaaatggccctggcacatccagaacatcagatgacttgacggtcttcgtcaaggaaacacggcctggcctggacgagcagcctgggttgggctatcacaacagattactgctgagcttgcccgctgacttggcaatgcccggagcagtgttgacgccggagcgcgctgccctgggtgttttaattacgctcgattaccccggtaagcgtgtgcgcgataaggtttctctgtattgggacacgatcgcgcaggtggtagtttttgaactcgatgaggaccatgcctccggggcaaagccaattgaagtgactgtcccgccaaataccattggcacgggtagcggcctgattcctatacgctaccaagtgttcgatgaagttcaaaaccgctccgggcatgtcgagcacttttcccaggccgtacatgtgcaagccgagcttgatcccaacttgcttgaacgggcgtacttccaaatcaattttgtcgatgcaacctcggtcaattacgacgaggacgcggggagtaatttccgtatcgaggtggttgcaccacgccggcttccaaacggaagctcaacgccgacaaacgctcgtgttttggtgacattgagcggtactgtcgatggtgtaccggtgctgacccaagatctgcccgacgctgccgccaatccaggactctcatctttttttaatgtcgatgacgacatcatcaaacaattgatcaaaggcacaatggtaatcacctggcggctggagttcccactgggcactgtactggcctcgtcccaatcactgacaatcctgatctccggcacgattgcgagtatgccggcagtcacggtgaggcaggccgatgcaggtctggtcgaccccaatgaacctttcatcaccattgactatccgaacccggcctatagcccctacgatccgaacaaccttgtcacgttgcgcatggaagccttactgccggggggcggcatcgttgagtatgaacaaccgcacttagccggcgcaccgccgccgcctacacgttttcggactgtgacccaagctaacttcgcacggtttgtcgggctgggcgatgtgcggattttctacaaggtcaacgatggattgatgaggatactgggcgctggcacagaagcgatccgcgaatccgattcgacctttgtgcaatttggtccccgtttagccgaaatgccacggccggaaatcgaccgagtcgatgaggacgataaccttgacccgaacgatttgtttggccaactcgatattacgctgccttacgacaggacaaacccggacgacatctttgaatggcgcctgatcggcaccgccgcagatggcagcaccagcgatcgaatcgttctgaatagggccactgcgggtagcccggtttcattctcgctggaccgacactacgccgacaccaatcagggcggcatcattcgcctgagttactcgctgatccccgcgaatggcgggcgcaccctgcgctctgaaatactcgaagtgaccgtcggcaaggcggtgggtgatctgcctcgcccggaagtgcttgaagcatcgaaagctcccgaccaattagccccggaagcggcgacagccggtgccaacattcgagtcaccttcccgcaaatgctgcccagcgaccgtattcgggcgtgctggacaggtattcccgacatcggcagccactgtgaaaccaaagacggcgacatccgtaagacggtggacttcaccgtcccgcctgaagtcgtgggcgccaatattgcgccatttggccagcaggttacggtgcaatacttcctgatacgcagcgggcgagaaaaagcctcccccattctggacctgttgctgctcaacctcaccaccttgccgatcccaaccatcgaaggtatcggggatgcgccgctactcgatctttccaggctcaatggtaccgagcgcaccgccattaacacctggcacttcatccataaggacgagcgtatatggatggaataccgaggcacctatgcaaccgatcctgaaagcgagttcttcgaggccacttacactaacaacctggtaaccccagatggcgtgaacaacggaatcctgccgccgccccccgtagacgagttgcgtaagctcaaggacggatcgacgctgaccatcagtttctgggtcagctttgatcgtagttccaacaaggccaatgctgtgctgtttcgtcaacggacgtacataattcaggcattgcccggcgtattaccacacccgtttatcaacggcaccaccgataccgggccaaatgtggcggtcgatccactgccgattgaacacaatacgacggtgaccgttcgctataccggtatgagtggccgagatttcatcacgcttgtatggacttttgccgacggcagcagtcattcggtcggcctgcctgggctggatggcggcaccgtggtgttcaatctcaccgccgataaagtcttgcatcgcagcgtgtacagcacggtatgcctgaaatattccgtggcgcgcacaggcgtgcctgacccgatcccgtcacaggtgcagacggtgtgggtcaatgcgattccggccgcggacttaccgcagccactcatcaacaatgtcatcgacgggggcacgctggacctgggaagttttaccggcgacgccaaggggtcagtaagtaaatggcctttgagcgataaagatcaactcacgtggatggtgttgagcgctgagggaattgaagatctaccggtgttcgaggccaaggcgattagtgccacggaggccgcgaatgggttgaaagatcaagcggtgctgcgtagttggttggccagggtactgaataacagccagatcacggttagtttttgggtggcctataaccgtattaacgataagagccgagcggttgagtttccaacgacaacgtacagtatcgcttatgaacccttgagcatcgacacctcaaccttggtactaaatggatggcactttaactccaccggtgcaaatcagattgctgattttcctggggccgcatttgcccgacagcctaagggaggcgttgcgccttattattattcaattcaacctcaaagttacccggccgcagtcatagataacagtggaaatgtcagaagtcgtagaaacggttcgacgcgagtcaccgtaagcgacagtgcaggcgcccaagtcagctacccagtgaccgtctcaaactgctgggatctgtatatcttggccggtgacgtgtatcccttcggccaccataactttcttgagagcgttcagccgccgtatgagcaaattccggaatcccgctggtcgtctatctacactgcgtacggcagagtacctatccgatggagcggggtcactcagcttgcttggataacatcggtggtcgagggtggcagatcgaaaagctataacggcaatacaggcgcgacccaatctgtaagcgtcaacgaaaacatcaggcacgctttgtgcgtggttccttcgcaggcgtcctgaggatatatctggctgcaatataaaagatacgaaggtacgtcgaggccgccccgttgaaaaaaccggggcggccctcgatttcacttattcaaggaataccttgacctgaaggcaccctcgcctcacggcaactattaattttcacttaatcccctccccacagcatccgaacatcccactcggagcccgacctatgcccttattccgcgttttctgcgccgccatcctgcttagcgcccccgccgcccacgtgatcgctgccaccgaaggcgccacgtatggccctgaactccaaggcttccaatacccccaccccctccaacatttcagcttccaatcccaaggcaaaaacctgcaaatgggctacatggacgtccccgccactggtactccaaatggtcgcagcgtggtgctgatgcacggcaagaacttctgcggcgccacctgggagggttcgatcaaggcgctgagtgacgccggttaccgcgtcatcgccccggaccagattggtttttgcacctccagcaagcccgaccattaccaatacagcttccagcaactggcgaccaacacccatcaactgctggaaaagctcggcattcaaaaggccacggtgatcggccattccaccggcggcatgctcgccacgcgctatgcgctgatgtacccccagcaaaccgaacagcttggcctcgtgaaccccatcggcctggaagactggaaagccctcggcgtgccttaccagagcgtcgaccagtggtaccagcgcgagctgaagctgagcgccgacggtgtacgcaactatgagcgaaacacctattacgttgggcgctggaaacccgagtacgagcgctgggtagacatgctcgccggcctgaacaaaggcccggggcatctgcaggttgcctggaactcggcgttgatttacgacatgatcttcacccagccggtgtactacgagttcaaggacttgcaggtacctaccctgctgctgatcggcaccagcgacaccaccgctatcggcaaagatgtggcgccgccggcggtgaaggccaaaatcggtcattacgaggtactgggcaagcaggtggccaagctgattccccgcgctacgctagtggagtttccaggcctggggcatgcgccccaaatggaagaacctgaacagtttcataaagccctgttgcaggggttgaaggccctttaattccaacttttcgaggcccgcgtgcatgtcgatacagatcgcagtgttggatgattggcaaaacgtggccagcgaggtggtggattggtcgacgctggacagcgtaggcaaggtgcattttctccacgactaccccgccgataccgccaccatggtcgagcgcttgaaagggttcgaggtgatttgcctgatgcgcgaacgctcaacctttgacaaagccctgctgcaagggctgccccagctcaaattgctggtgaccggcggcatgcgcaatgccgccatcgacattcccgccgccaaggccctgggcatccaggtgtgcggcaccgacagctataaacacgccgcaccggaactcacctgggccttgatcatggcctctacgcgcaacctgctcgccgaagccaactcgctgcgcgcaggtggatggcaggttggcctgggcggcgatctgcatggcaagaccttgggcatcctggggctgggcagcattggccagaaagtcgcaaggttcgcccaggtgtttggcatgcgggtgattgcctggagtgaaaacctcacacccgagcgtgcggcggagtcgggggtgacctgggtcagcaagcgcgagctgtttgagcaggcggatatcctgaccatccatctggtgctcagcgagcgcagccgtggcctggtggatgcgcaagccttgggttggatgaaacccagcgcgcggctggtgaacaccgcacgcgggccgattgtggatgagcaggcactggtgcaagccttgagccgcggtcgcctggccggggcggcgctggacgtgtatgccgaggaacccctgccggctgaccatccgtttcgcagcctgcccaatgtgctggctacgccacacgtggggtatgtgagcgagcagaattaccggcagttctatcagcagatgatcgaagatatccaagcctgggccgagggtgtgcccattcgcgggctcgcctgacgcaccactttagtgcgttatttcaccctgtattcaggtaggagcgagcttgctcgcgaaaaacgccaacgataacgcggtcattctggttttactcggcggcctttggtttttcgcgagcaagctcgctcctacagaggcagggcggtatatcgttaaaagttttttgtcctacaaaatccgcatgaaaacccagcaggcgctgggatctgtcctagactcatgaccgatgggtccgttccaaaacaaaaaccccgcaaaaaatctaaactttcgaaacctgccgctggtcaagttttaggtaagggcgagcacgcgcgcttcaggccgaatgcccgctcatccaatctttttaagccgacgttacaactggcatacgccttgccagcttgtatagcgcttgtgtgtctggccgcaggatgcggtcactcggagccgatggcagcgggccattagccaaccaacagatgggagtgcattatgatcagtgccgcagtagatactcagggagagcgttttagtcagccggcaggagggccaaagtctttggccgacctgcccaacactgtgcggccggtcgtgagtcagaatccgaatcgaaagaaagtcttgtttgtcacttccgagttcgcggacctggtgaaaaccggcggcctgggcgacgtctccgcggccctgccccgcgccatggcgcacctacatgatgtgcgggtgctgatcccgggttacccgcaagtgatggaaagcgacaacccgattcatatcgtcggtgaactgggcggccacgctgcgttgccaccgtgcaagatcgggcgcatggacctcaaggatggcctggtcatctacgtactgatctgccccgaactgtatgagcgtgaaggcacgccctacggcgccaacaatggtcgcgactggccagacaaccatatccgcttcgcccgcctgggccttgctgccgccgacatggccgccaacctcgcgcaaatccactggtgcccagacctggtgcacgcccatgactggcctgcgggcctggctccggcgtatatgcactggcgtgggtcacgtacgcccaccctgttcaccattcataacctggcctaccagggcgtggtcagcctggcctcgacgccagagctgggcattccgccccacgccctgcaacaggaaggcatggagttctacggcaagatgtcgtttctcaaggcggggatggcgtattccagccatatcaccaccgtgagcgccacttacgcccaggagatcaccaccccggaattcgggtgtggcctggacggtttccttgccagcaagactcaacaggggctgctcagcggcattcccaacggtatcgacgaaagctgggaaacctccaccgacacgcacctgatccacaacttcaatatcggcgactgggaaggcaaggccatcaacgccgcccatgtgcgcgagctgtttgagctgcagccatccagtggcccgctgttcgcggtggtctcgcgcctggtctaccagaaaggcctggacctcaccgaagccgtcgccagtttcatcgttgagaacggcggccagattgcgatcatcggccgtggcgagcctgaagaagaacaggccatgcgcgaattggcactgcgcttccctggccaggtaggcgtgcgcatcggcttcaacgagaccgatgcacgccgcatgttcgccggcagcgattttctgctgatgccgtcacgctatgagccctgcggcctgagccagatgtatgcgcaacgcttcggctcgttgccggtggcgcgtaacaccggcgggctggcggacaccattgaggatggcgtcaccgggttcctgttcaatgagtcaacggtgcaaagctacgaagaggcgctgcgccgcgccttcaaggtgttcgccttccccggtctgctcaatgccatgcgcagccgtgccatgacccagccgttcaactggtgccaggcggtggaaccctacgccgaactctacgaacaactggtggccaaggccctggggaaatcgaacaaatagcgattggaacaacaagggaggtcttcatagatgccgttacggactcttgaaacctggccccacggcgcaatcatgctggacgcgcaccgcacgcgctttgcgttatgggcgccagacgcattttatgtcagcgttgaattggaacagggtaaaaccatcgtcatgctgccccaggccggtggttggttcgaagtcgaagtcgcgtgccctgccggcacgctttaccgctttaatatcgatggcgaaaacacggtgcctgaccccgcctccagggcccaggcgctggatgtgcatggctggagccgagtagtcgaccccctcgcctatgaatggcgccacagccagtggcaaggccgcccctggcacacggcggtgatctacgagcttcacgttggcgccatgggcggctacgctggcgtcgagaaacacttgccgcgcctggctgagctgggcgtcaccgccattgagttaatgcctctggcgcaattccccggcgagcgcaattggggctatgacggcgtactgccctacgcgccccacgccacctacggcacgcccgagcaactcaagcaactgatcgacagtgcccacggccatggcttggccgtgatcctcgatgtggtctacaaccacttcggccccgacggcaattacctgggccagtacgcccagggtttcttccaggaagacgtgcacacgccctggggcgccggcattgatttcgagcgccgcgaggtgcgggatttcttcctcgataacgccttgatgtggctgctcgaataccgcttcgacggccttcgcctggatgccgtgcacgccatcgacaaccctgggtttctgcaggaactggcacaacgggtacgccagcaggtggacggcgggcgccacgtgtggctgatgctggaaaacgaactgaaccaggccagcctgttgcagcacgatttcgacgcgcaatggaatgacgactttcataatgtgctgcacgtgctgctcaccggtgaaaccgacgcctactacagcgactttgccgaacagcccaccgccaagctggcgcgctgcctggccgaggggttcatctaccagggcgagaccacacgccatgggcatgcccgcggcgagcccagtgcggatttgccccccagcgccttcgtggcgttcctgcaaaaccacgaccaggtcggcaaccgcgccttgggagaacgcctgcaccagctgtgttcgcccgaggcgctgaaagcggcgactgccctgctgttgctgtgccccatgatcccgatgctgttcatgggcgacgaggtaagtgccgccgagcccttcctgttttttaccgaccatcatggccaattggccgaggcggtgcgtgaggggcggcgcaatgaatttgccgacttcgcggcgtttcacgaccccgagcaacgccagcgcatccccgaccccaacgcgctgcaaacctttttacagtcggtgccctccttcgtcgagaacgaccacacccagctctaccgtcacctgctgagcctgcgtcacacacacgtggtgccgcacttgcccggtacggtggccctgggcgcgcaggtgctggctgaccatgccgtcaccgcgcgctggcgtctgggcaacggccgtgtgctgcagatcgacctgaacctgagtgaacagcccctggatcatccggcaccccacccgattattttccaaacgcctgcccagcaaggtgcgcacttaccgcccttgagcgcacgcgtttgcttatcccctgttggagacattctttgagcgaagcgaacctggaaattctcgccagccgcgcaggcctggccgtcgattggatcgatgccaacggtcgcccgcagcatgtaaagcctgacgccctgcgcgccgtgctcaaaggccttgggcatccggccgacaacgacgacgagatcgacgccagcctgcagcaacttgagcaggcacagcaagacacccacctgccgcccttgatgaccaccgacagcggcgcgggcctggacctggcgcgctatttcgccccggacaccccgtgtcgcgtcagcctggaaggcggcgaaaccctggagctgcgcctggacggcgaggccgtgctgcccggcgtcattgccctcggctaccaccaggtgcatatcgacgggcaaaccttcaccctggccgtcgcgcccagccattgctatagcgtggccgacgcggtcgacagccaacccgctcgcgcctggggcctgagcgcccagctgtatgccttgcgccgcctcggcgatggcggttttggcgacaccctggctctggaacacctggtgcgttcagccgccgagcgcggcgccgacgccgtggcaatcagcccgatgcacgcgatgttcagtgccgacacggagcgcttcagcccttattcaccctccagccgcctgtttctcaacagcctgtatgcttcgccggcgtgcatcctcggtgaacgtgaggtgcgtaacgccatcgaggctgccggcttggccgatgagctgcatgccctggaacagctcacgctgatcgactggcctgccgccgccaaggccaagcaacgcctgctgcgcacgctgtatgaagacttccgccacggcgcgcatccccagcatgccgactttcaaagcttccgccaggccggtggcgaagccctggaaaaccactgccgcttcgaagccatccaggcccagcgtgctgccgccggtgaggacctggactggcgccaatggcccgaagcctggcgtacgccacaaagcccggccctggcgcagttcgccgaagacaaccgcgatgaaatcggttattacgccttcacccaatggctgatcgcccgcagccttgagcgcgcccaacaagccgcccgtggcagcggcatgggcatcggcctgatcgccgacctggcggtgggtgccgacggtggcggcagccaggcctggagccgccaggatgaactgctggccgacctcactgtgggcgcgccgccggacattctcaaccgcgcaggccaaggctggggcatctctgccttttcgcctgagggcctcaagcgcaatggctatcgcgcctttatcgaaatgctgcgggccaacttcgcccatgccggcggcttgcgcatcgaccacgtgatgggcttgcaacgcctgtgggtgatccccctgggcgcatcaccccgcgaaggggcctacttgtattacccggtggacgacctgctgcgtttgctcgccctggaatcgcaccgccaccaggccatcgtcctcggtgaagacctgggcaccgtgcccgacggcctgcgcgaaaagctcagtgcccgctcgatcctgggcatgcgtgtgctgctgttcgaacagcaccatgacggccagttcaagcccatactcgattggcccgacaacgccttggccaccaccagtacccacgacttgcccacccttaatggctggtggcacagccgcgatatcgaatggaacatccagctgggcctgatcgacgcgcctactgtggaccaatggagcgaacaccgcctgcgcgaacgccaggcactgcgccaagccttgagccaggacccgcagaacttcatcgatgaaatccgcaacgacaccgaccatatgatcgacgccagcgtgcgctacctgggccatacccgcgcgcccctcgtgttgttgcccctggaagatgctttgggcatcgaggagcaagccaacctgccgggcaccctcgacacccaccccaattggcgccgccgcttgcccggcgaagccgccagcctgctcgacaatgacagcgccgcgcgtcgcctcgaactgctggccgtagcgcgcaaccaagcctatgagcgtgaccgatgaacgcactgcccctgcgcgccacccagcgcctgcaatttcataaaggctttaccctcgatgacgcggtgccgctggtgccgtatttcgcccaactgggcatcagccatctgtatgcctcaccgctgttaagcgcccgcgccggctccatgcacggctacgatgtggtcgacccgacccgcgtcaacccggagctgggggacgaagcggcgttgcgtcgcctggtcgccgcgctgcgtgagcacgacatgggcttgatcctcgatatcgtctccaaccatatggccgtgggcggcgcggacaacccttggtggctggacctgctggagtggggccgcctgagcccctacagcgagttcttcgacatccagtggcattcccccgacccgttgctcaagggccagttgctgatgccctttctcggcagcgattacggcgaagccttgcagaatggcaccttgccgctcaagttcgatgccgaacaggggagtttctacgtcgagcattacgaacaccgttttccgatttgccccagggactacggcctgatcctgggcaacgatgagttactcaaaccgctggccgaacgtttcgccgccctcgcctatcagcacgacgcctacgccgaagccgccacgctcaaacaagccctggccgaacgcgccagcgagctgctgccagccatcgaacaacgcctggctgcattcgacagtcgccagcccgagggcttcgagcgcctgcatcacctgcttgaacaacagacctatcgcctggccagttggcgcaccgccgcagacgacatcaactggcggcgcttcttcgacgtcaatgagctgggcggcctgcgggtcgagcgtgcagcggtgttcgaagccacccatggcaagattttcgagctgatcagcgcggggctggtcgacggcctgcgcatcgaccatatcgacggcctcgccgacccgcgtggctattgccgcaaattgcgtcggcgggtggatgcgctgtcaccccagcgccacttgccgatctttgtcgaaaagatccttggcgaaggcgaaaccctgcgcgaagactggcaggtggatggcaccactggctacgagttcatgaaccagttgtcattgctgcaacaccaacccgaggggtttgcgccgctggcccagatgtggacgcgttacagcgaacggccttcagccttcggcgaagaggcgcggctggcgcgccagcagatcctcaatggttcgttgggcggcgacttcgaaagcgtggcccaggccctgctgcaagtggcccgcgatgacgtaatgacccgcgatctgaccctgggcgccattcgccgtgccttgcaggaactgattgtgcatttcccggtgtaccgcacctatatcagcgccaagggccgcagtgcggacgatgacaaggtgttccagcaggccatggagggtgcgcgcagcaccctcaacgagggcgactggccggtgctcgaccacctggagcaatggctcggtggccagccatggcgcaatcgcccggtgggccgcgcgcgcaagatgctcaagcatgcctgcgtgcgcttccagcaactgacctcgccagctgccgccaaggccgtggaagacaccgcgttctaccgctcggcggtgttgttgtcgcgcaacgatgtgggtttcagtaccgagcaattcagtgcgccgttggccgatttccatgcggccaatcaacagcgcctgcagaccttccccggcaacctgctggccaccgccacccacgaccacaaacgcggcgaagacacccgtgcgcgcctggcggtactcagcgagtgcgccccctggtatgccgaacaggtcgagcactggcgccgcctggccgagcctttgcgcgagagcgccgagagcccctcggcgggtgatgaactgattctttatcaggtgctgctgggcagttggccgctggagcccaaccccgatctggaggcgtaccagcaacgcctgtggcagtggcagcaaaaagccctgcgcgaggccaagttgcagagcagttggagcgcgcccaacgaggcttacgaaaaggcggtggaagcgttcctcaagcgcctgctgctcagtgaggccggtgcgccgctgcgcagtgcgttggacatcgctgcgcaggccatcgcccccgccggcgccctgaatgggctggcgcaaaccttgcttcatctgaccgtgccgggtgtgccggatatttaccagggcgatgagttctgggacttcagcctggtcgacccggacaaccggcgcccggtggacttcgctgcgcggcaacgtgcattgcaggcaccaccggacatcggcgaactgttgttcaactggcgcgacgggcgtatcaaacaggcagtgatcgcccaggtgctgggcctgcgtaaagcctgccccgaactgctgcgccatggcagctacacaccgctggaagtgctgggccagcacgcggaacgcgtcgttgcgttctaccgtgaacatcagggcaggcagttgctggtggtggtgccgcgctggtcttatcctctgcttgaaaacgggatgtttccccagatcaatgcgcaggtttggggcgatacgcgggtgaaattaccgttcgccgcccctgcacaaaactggaagggactttttcaaacgggcgtagtcacacccaacaaggagctgttgatcagcgctgccctgggggatctcccggtcaatgtctttatcaatcctgataatcaagaaagctgaaaattttctgtgaggagtttgtgatgagtaaagaagacaaacgcattcgcgaactggcgcatcagatctgggagtctgaaggcaagcccgatggcgcccatgatcgccactgggagatggcgcgcaagctggccgaagccgaggcgctgacgccgagcaagcctaaaccggccgccaagccaaaaaccgcgcccaaggctgcggccaagcccaagccggctgcgcctgccgccgccaaacctgcggcgaagaaacccgccgccccgaagaagcccaaaccgcccgccccatgatttctcgggcctgcagcacgcaatgcgcgctgcaggctcttttccgtccatgccatgcgctgaagcaccgtcagtacggcggcgttcggcccgaaaaaagaccccttgcaggagcaactcgatgagcaaacccgacaacaccacagcgacgccggttcatgagccgtcgcggatccgtgaaggtttgcccttcccccttggcgccacctgggatggcctgggtgtgaactttgcgctgttttccgccaacgccaccaaagtagagctgtgcctgttcgacgataccggcgaggttgagctggaacgcatcgaactgcccgaatacaccgacgaaatctttcatggctacctgcccgatgctcaccccgggctgatttacggttatcgcgtatacggcccctatgacccggccaatggtcatcgcttcaaccacaacaagctgttgatcgacccctacgccaagcaactggtgggcgaactcaaatggtccgaagcgctgtttggctacaccatcggccacccggacgacgacctcagtttcgatgaacgcgacagtgcgccctttgtgcctaagtgcaaggtcatcgacccggcgcacacctggggcaacgaccaaccggtacgggtgccatgggaccgcacgatcatctatgaaacccacctgcgtggcatcagcatgcgtcacccttcggtgggcgagtcggtgcggggcacctgcgccggcttgatggaagatgacgtgctcaagcatatccgtcagttgggtatctcctcggtcgagttgctaccggtgcacgccttcatcaacgaccagcatctgctggaaaaaggcatgaccaactactggggctataacagcatcgcgttcttcgcccccgacccgcgctacctggccagcggcaagatcgccgagttcaaggagatggtcgcgcacctgcatgagcaaaagctggaagtgattctggacgtggtctacaaccacaccgccgaaggcaacgagcgcggcccgaccctgtccatgcgtggcatcgacaatgcctcttactaccggctgatgcccgacgacaaacgtttctacatcaacgattccggcaccggcaacaccctggatttgagccacccgtgcgtgctgcagatggtcaccgactccctgcgttactgggccaccgagatgcacgtggacggcttccgcttcgacctggcgaccatcctcgggcgctaccgcgacggcttcgatgagcgccacagtttcctcgtggcgtgccgccaggacccgatcctgcgccagttgaagctcatcgccgaaccctgggactgcggccccggcggctaccaagtcggcaacttcccgccaggctgggtggaatggaacgaccgtttccgcgacaccgtgcgtgcgttctggaagggcgacgacggccaactcgccgacttcgccgggcgcatgactgcctcgggcgagatgttcaaccaccgtgggcgcaggccgtacagctcggtgaacttcatcaccgcccacgacggtttcaccttgcacgacctggtgtcgtacaacgacaaacacaacgaggccaacgacgagaacaaccaggacggcagcaataacaatctgtcctggaaccacggtgtcgaaggccctaccgacgacccggagatcaacgcgctgcgcctgcgccagatgcgcaacttcttcgccactttgctgctggcccagggcacgccaatgatcgtcgccggggacgagttcgctcgcactcagcacggcaacaacaacgcctattgccaggacagcgagatcggctgggtcaactgggacctggacgatgacggcaaggccctgctcaagttcgtcaagcgcctgatcaagctgcgcctggcgtacccgatcctgcggcgcgggcgtttcctggtgggcgactacaacgaagacatcggcgtgaaggacgtcacttggctggcgccggatggcaacgagatgaccaccgagcaatgggaagacagccagggccgttgcctgggcatgctgatggatggccgcgcccaggaaaccgggattcgccgcgccggggccgatgccacgctgctgctggtggtcaacgcccatcacgacatggtcaatttccgcctgccgccggtgccggagggtgagttctggacctgcctgctcgacaccaacgacccggctgtgcgtggccaggaacgctttgatttcgagcatgagtacgcggtcaccggccgctcgctgctgctgtttgaactgcagcacgaaggcgaggtgtgaaatggcgttgcacggtttccttcagggctaccggggctatgccgacacgcaagccctgggtaatgcgctgagggcccttcaagaggaaggccttgaccaactgccgttgccgggcagcggcgataccctggcccgcttgagccaattggctcaggtggccgggcatgacctgcgcctgtgcaagttgttcgaaggccataccgatgcgctggcgatcattgccgaactcgacagccccttgccgccgctgggcagcacctggggcatgtgggcggccgagccgccggccgccaaggtgcgcgtgcgccacgacggccagcgattgctggtcgaggggcgcaaagcctggtgttccggtgcggcggtggtcagccatggcttgctgacggcctgggacgaagaggaccgccagcaactggtggccgtggcgatggatcaaccgggcatcacggtgacggatgagggctggaaggcagtgggcatggcggcgaccggtagtgtcgacatcctgttcagtgccgccagggggattgccgtgggtggcccgggcgactatctgtcccgcccgggcttctggcacggcggcatcggcatcgccgcgtgctggtacggcgcggcgcaacgcctgggtgaagtgctgcgcgcccaatgtgccacgcgtgcggagccccatgcactggcccacctcggcgcggtcgacagcgccctgaacagcgccgcctgcgtgttgcgcgccagcgccgcgcagatcgaccgcgagccacgcgccgatgcgcggcaactggcgcaacagacgcgtgcgtgtatcgaggacaccgtcgagcaagtgatccagcatgtgggccgtggggtcggcgccgggccgtattgcaaggacccgcactttgcccagttgatggcggatttgccggtgtatgtgcggcaaagccatgccgaacgcgacttggccgccctcggcgaacaggtcgccggcgagcccacagggagatgggcgctatgaagcccaatccgattgttggccagggcacaccgctgagccactggcaaaacagcgcacgattggccgagttgccgcacatcagtgtggcgcagttggtgccgccagggcatcgagcggtgatcgtcgccccgcacccggatgatgaagtgctgggcagcggcggcttgctgcaagggttggcggcgctggatcgccccatccagttgatctccgtcaccgatggcagcgccagccaccctggctccaggcgctggccggtggagcgcctgagcgtggtgcgcccgcaggaatcagcccaggccctgcaccgccttggcttgccgctgcacagtttgaaatggctgcgcggcgggttcgccgacagccatgtggccgagcgcgaaacccagctgtgcgagtttatccagcgccacctcaagcccaacgacgtggtgtttgccacgtggtgcgaggatgggcattgcgaccatgaagccgtgggccgcgccagcgccaacgcagccaaggccgtcggcgcagcgttgtgtgaactgccggtatggacctggcactgggccactgccgaagaccacaaggtgccctggcatcgggcgcgcaagatcccgctgaccgccgagcaagtggcacgcaaacgccatgcgatccatgcctttgccagccagttggagggcgacccgcaaatcggcctgcctccggtgctggcgccctatgtggtggaacgcttgctgcaaccttttgaaatggtattcgtatgagtgtggcaaccccctacttcgaccaattgtttgccggcaatgacgacccttgggcttttcgccagcgctggtatgaacaacgcaagcgcgccctgaccttggccatgctgacgcggccgcgctatgcgtcgatattcgagccgggctgtgccaatggcgaactgagtgccgagctggcgccacgttgcgaccgcctgctgtgctgcgacaccgccagcgctgcggtgcgactggcacaggcgcggctggagcgttttgctcatgcccgcgtggagcagcgccgcctgccggagcaatggcccagcgggcagttcgaactgatcgtattgagtgagctttgttactacctggatgcagatgatttgaaacgtctgatcgattgcgccctcgccgccttgaccgctgacggtcaactgctggcctgccattggcgaccacccattgacggttgcccgcaaaccgccgaacaggcgcacgccgtgctccaacagcgtctgggtgtagcaccgttggtgcaatatcaggacgcggatttcctactcgacctgtggagcctcgacggcacctcagtcgctcgtcacgagggcttacgatgatcggtattctgatcccggcacataacgaagaagcctggttggatgattgcctgagggctgcgcggatcgccgccgaccacccgggcttgctgggtgaagcggtacacatcctggtggtgctcgacagttgcagcgatgccagcgcggcgatagctcaggcccaccaagtgcactgcctgcacgtgcaggcccgcaatgtggggcatgcccgtggcgtgggtgcaacgtacttgctggagcaaggcgcgcggtggatttcctgtaccgacgccgacagccgcgtcgcccctgactggctggtggcccaactggcccaagactgtgacgcggtgtgcggcacagtcaccgtagacgcctggagcgaaggcttcgacccggctgcgcagatccgctatcagcaggcctaccaggcccgcgacgggcatcggcatatccacggtgccaacctgggcgtgagtgcccgcgcctatgtagaggccggagggtttgaaccgctggaatgccacgaagatgtacagctggtgcgtgatctggagcgttgcggcgcctccatcgcctggagccatgcaccgcaagtggtgaccagtgcgcgcctggattgccgggctgagggtgggtttggggactatttgaagagcttgatgcaggctgggtgaaaacgaaaaagcgtttaacagcagggggctggagcgcggtcatcgcaggcaagccagctcccacagggttgtgtgccaggcgctaattttttgggcaacccatgacctatgtgggagctggcttgcctgcgaagatgtcggcccagccaacattgatggtgactgaccgaccgctttcgcgagcaagcccgctcccatagttggatcgtggggcggcaggctaatcgtcgacggttatgcggcatcgcatccaaagttgtgcggacacccatgcctgtctatgctcctaacgcctcgcacagcactcaccccagcggagcctggggtgaagacaagagcgtcgtcccgtcaacggggtacgacccggtatcaaccgacaaggatgtgacacccatgaagcctgcctccttaagcgaaggccgccgcggccccgcgcaaatctggaacagtgcgccgcagttggcgcaaatccccatcatctccctgaacaccctggtaccgcgcggcgctcgcgtggtggtgatcgccccgcacccgggcgatgaagtgctggcgtgcggcggtttgctgcaactgctcagcacccaggagcatcccctgcaactgatctccatcaccgacggcagcgccagccatcccggctctcaggtatggccggccagccgcttgagcgtggtgcgcccccaggaaagcgccgaagccctgcgccgattgggcatgcccttgcacagcctgaaatggattcgtggcgggttttgtgatgacgccctggccgcccgtgaacagccgatgagccagttcatcgcgcgctacctgcaacccggcgacgtggtgtttaccacctggcgcaacgacggcaatgacgaccacgatgccgtcggccgcgcgagtgccaaggcatgtagtttggtgggtgcgcaactgtatgaactgccggtctgggcctggcactggcccgcacgggaaagcgcggtaatgccctggcaacgtgcgcgcaaggtccgcctggacacctggaccgtcgcgcgcaaactgcacgccgcccatgcctacgccagccaattggtgggcgacccgcagatcggcttaccaccgatgctcgcgcaaatattgctggaacgcatgcgcgagccctacgaaatcctgttcacctgaaagcaaccctgtaggagcgagcttgctcgcgaaaaacctcaacgatacgtgggcttcctgaataaacgcggcgcctgtgagtctttcgcgagcgaggtcgctcctacagcgttggggcttttacctacagactcaatctgccaaactgatgcgaataattatcaacagatttactattcgccacggacggcacttggggagccctactttcatgtctgtgcaacaacgcggcggcaacgtttttacacccagtctgatggcaatcactatcgctctagcaacctccaatgcggccattgccgccgacgccgaagccccggccaccatcgagctgggtgctacccaggtctcgggccaacagcttggcgcaaccaccgaaggcagcgagtcgtacaccaccggctcgatgaagaccgcaaccaaactgccgctgaccctgcgcgaaaccccgcaggccgtcaccgtgatcacgcgccagcgcatggatgaccaggccatgaccagcatcaacgacgtggtcaacgccacgccggggctgttcctcaattactccaacggccctgggcgacaaggctttaccgcacgcggtttcgacatcgacaacctcatgtatgacggtatacccagcggctacaacggtgcatcggtaggcgcgcagccgaacctggcaatgttcgaccgcgtcgaagtggtgcgcggcgctaccggcctggtgaccggcgcgggcaacccttcggccgcgatcaacctgatccgcaagcggccactggacgagcagaaagtcacgctcaccggcgccgtcggcagctgggacgactaccgtggcgagctcgacgcctccagcccactcaatgacagtggcacctggcgcggccgcgtcgtcacctcttaccgcgatgccaacagttttatcgacaaggccgagcaggatcatggccttttctatgccgtcaccgaagccgacctgagcgaagacaccaccctgaccctcggttactcgaaccagaaggacaagaccaactacttctggggcgcttcgatggtcggcctggatgggcgccacctgggcctgtcgcgctcctataacccaggcaccgattgggagaacaaggaccaggaaatcaacaccgtgttcgctgagctgcgccagcgcctggccaacgactggagcctgcaggtcaacgccaactatgccgaacagaacgccttgttctccggctcctaccaatcgcgctggaccaacaacaccctggcccgcacggtgtaccaggccagctatgatgaaaaccaggccgggctcgacgcctttgccagcggcccgttcgaggcgttcggccgtagccatgaactggtggtgggcgccagcaagcgcatctacgacatgaccacccataactacagcccgtacgacctcaactggccgatcaatgccggcaaaccgaacttcacccacaccaacaatgtgcgcgaagtcaccacccaggatggtttctacctcaccagtcgcctgagcctggccgacccgctgaagctgatcctcggcgctcgcctggactggtacgactacgacaaccgtgatgccgccggcgactacaaggtcacccgcaacctcacccgctacgccggcttgatctacgacctggacgaccagcattcggtatacgtgagctacagcgacatcttcacgccgcaaaaagaaaagagcacagccggcaccccactcaagcccatcgtcggtaaaaattatgaggttggcgtcaaaggcgaatattttggtggcgcgctgaatgccagcgtggcgctgttccgcgtcgaccaggaaaaccgcgccgtgccggtggtggtgcccaactgcccgcaggcgtcttgctctgtggcctcgggtgaaatccgcagccagggtatcgacttcgaactgcaaggcgccttgaccgaaaactggcaggtcggcggcggctatacctatgcgcgcacccacaccatcaaggacgacgccaatccgcagaaggtcaacaagcaatttgacaccgacacgccggaacacctgttcaaagtgaccacccgctataactttcagggcccattggaaaaactccgggtcggcggcaatatttcctggcagagccgcatgtacaacgacatcaagctggccgatggcagctactatcggctcaagcaaggcggctacgccgtcaccgacttgatggcaggctatcgggtcaatcaacacctggacctgcagctcaacgccaacaacattttcgatcgccactactaccagtccatctccgactcagtgacttatggcggcgactcctatggcagcccccgcaatatgatgctgaccgccaagtacagcttctgagcctcatcgctacctcggctgcccgctcgggcagccgttcttaaagtcccgtgcctgcatgccgataacgcgtgggtaaccggcaataatcgtgaacatctgcttcactccacagcggcgcgcctgggtggcacaccgcgtgcttgcttgacctcgacgcccccccctctcatggagtaagagtgaatgcccgtccgttttctcgagcactatcgcaaggccgaccgcatcatgctggcattgatctggctgatgttcctgttctccctcggcctggcgttctggcacgacaccctcatgcaggccgtgatcgtcggtgggggcaccggcgtggtgctcacggcgctgtaccgcgtgattggcggcacccgcgtgatgcgctgtgcactgggtgccggcttgatggtgatggcggcgttgcacatcaaccaggcgcacggggtgatcgaatcccacttcggcattttcgcgctgttggcggtgctgaccttctaccgtgactggctgccgatcctggtggcggcactgaccatcgcggtgcatcacgtggtgttccatgcgttgcagcatcaaggtttccctgtgtttgtaatggagcatcacggcggctggacgatggttttcgtccatgccttctatgtggtgatggagaccgtcgccctgctctacctcgccgttcatagccaggccgaagcggtggagagccaggaaatgcttgagaagatgctcgccgttacctcgcagttcaccgtggaaaccgcccaaggtgaaggcaaggcccacgtgtccctcgccaagcgtttcgaccacttcctgcagcaactcacccacctgatcgacggcgtcgcccgcgactcccatggcctgggccagctcggccaggaactggccagcgcgagcggcaccctggaaaaaggcgcccggcatcaactggcacagatcggcgaaatgaccggctcgatgcagcgcatggaagacgccatgggccacattacggtgcaagttgaacaggcagtcgaacacgcgggccaggccagccagcagattgtgcgcggccaggaaagcgtcggccgcgcccagcatgaaatcagccaactggcttcgcgcatcaacggcacggagtcgaccgtagaatccctggcggtgcaggctgaacaaatcggctcggtgctggaagtgatcagcagcatcgccaaccagaccaacctgctggccctcaacgccgccatcgaagccgcccgcgccggcgagcaaggccggggctttgccgtggtggccgatgaagtgcgcagcctggcccaacgcaccgccctgtccactcaggaaatcaagagcatcatcgagggcctgcaacacggcagccgccaagccgtcgaagccatgcacgccagccgcgaaggcgtagagcgctgcgtggcagacagccaagaggccgtggacatgctacgggcggtgggcgaggacatcgcgcacatcgaccaactcaacggccacatcgtcaccaccacccgcgagcagacctcggccaacctggagatcgtcgagcgcttgcagtcggtgcaaagcatcgcccagaacaccgccgacgacgtcgagacactcgcgcgcagcagcgaacgcctgccaccgatcgcggtgcggctggatgcgttggggcgcaggtttcatccctgagcccaacccggcacatggcgagtcaaagagaataggtgcgtataccgctggagtgcatcaaggttccagatgcggagccatcaaagcggcaaaccaatcgatgaacgcgccaaggcgacgagagcgttggcggcgagtcgggtacagggctgaaacgcacatgggggccggccgataggccgccatcacctccaccaattcgccgctgtccaataagtgctgaacatcgaacaacggcacctgaatcaagccaagccctgcacagcatcctgcgatatagctttcggcattattgaccaccacacggctcggcatcatgacagcctgcgcggtgccatcgacgcaatattcccaggccgtttcctggccgcctgcgctcgtgctgtagccgatacagacatgtcggttttgcagatcgcaaggctgtatgggcaccccgaattccgtcaagtaggcggggctcgcgcaattgaccagcaacaccttgcccaacggcttcaccaccaggctgctgttctgcggggtgccaaaacgaatgacacagtcaacgccttcctgtaccagatcaatggcgcgatcagtggagcccaggccgagttggagcccagggtagaggcggagaaactcggccaacgcaggcatcaccaagcgccgcgctatgcggctgggcacgtccacttccagacggcccatgacctgttcctgatggctgttaaacagttggtcgatatcatcgatgtccagcaagacctggcgcgccttcagcagtaactgggtgccatcggcggtcagggagaccttgcgggttgtccggtgcagcagtcgagtgccggcattggcctccagctgttgaatggcggccgacacgctcgcgcgtggcagcctcatcagccgtgccgcttgtataaaactgccaagctctgcgacctgaacgaagacgcggtactgttcgattctatccatgggctctcaatgctcgggggggcacggatcgatcggcgctcaccacgtctgcgccagcgcgttaaccgtttacttggtggtgtagccgccattgatcaaaattgtctggcccgtcacccaccacccgtcactgaccaggttacggatgaacgggaccacatcctcaatatctgtgaggcccgtgcgcgagaacggcgacagcgcggcagccgtcttgtggtaactgaccgcatcctcaccctcggccgggtagaagaacggcgtatccataggccccggccctactgccgtgaccgaaataccccgaacgcccaactccttcgccgccgctcgcgtaaattgctctaccggcgccttgctgccggcatatgcagcgtaaaagggcgtgaaagcgcccagcagtgaagtgacaatagtgcagatcttgccattgtcattgaggtgcttgccggcttccttgataaaaaagaacgcagtcttggaattgacggccatcatctcgtcgtactccgcctccgtgatttcagccattggctttttcagcaccttgcccacggtattgatcgcgatgtccggcctgccgactgccgcgacggcatcattgaagagtttttccatcgcccccgccgtggtcaagtccgcctgcaatgccacagccttcgcgcctagcgcctcgattgcggcgacggttgcgttcgcctcagcctggctggaagcgctgttgtagtgcacgaccacagccttggcgccatgcttggccagatcgcgggcgatcaacccgccgaggttcttcgcaccgcccgcgatcagtgcaaccttgccgttgattgaatgattaggcatgacaacattcctttaattgggagaagtacgccgccattctagagcggccctcgacaaagataagcacaccttggctggatgcagtgttcagagatactgcctaatcacaaaggccctatcggtgaatgaaaaggatgtgaggtacgctacactccggccttgcacaccggccaaggaagcccccatgagtactcgtggcagagaccgacagatcgacaatatcgaattcaacgtaagcgacattgcccgcagcaaagccttctacggctctgcattcggctggacattcgtcgactacggccccacctacagcgagttcagcgatggccggctcacgggtggtttcaccaccggtgagactgtgcggccgggcgggcccttggttatcttgtatgccgatgacttggacagtgtgcagcagcggcttcaacaactgggtgcggtgattacacgccagacgtttgcgtttccaggaggccgcagattccactttaccgacccggatgggtatgaactggcggtgtggagcgttgcgccgtgatccagcgctttcgctgtatcgctgaagctcgacatctccaaccgagaacaggttgcgttgtgtgagcctgttctgggtttcaaagctgttgcagcttgcgctgcaagcgggccatgtaccgattgacgatcagtttgtgcgccggccccaccggcagcatgtaaaggcgcccgaaggtgttgtgggtgatcaccgatgaagtgatcgtcagcacacgatcagcaattgaaaggcaaatcatcacatccaggtgccggtcacgctcagtcagcaccagcctatccggcgcgcagtcctctaccaggaaaaaatccagccgctcacccgcttgcaccgtcacgcgccgattgccggagaacccgccgatgcgctttacgccaaatcttgaagaaatcccatccctgatccgaaaggccaatcgcaacagcggccccggttcagcggtcatgatgttccaggcttccagcgcgctgatctcagtcggcaatggcaccgacctgcaatcgtaataatcgagttcagacggtgcacccaacgtgtgactgacagagttagtcgccaaggtttttccgtccatgaccaaaacagggatttgcatcataacgcttcaagcgagatgctgcgctaagctcgacagggtctgtgtaatccaaacggagtacccattatggaatacgacgaaaaactgattgaggaagccgtacttgccctgctgaccaccttcagctttgataacggcaactcatggaaaggccacgactttcaaataatgaaccgactccacgagcaaggttttatcagtaatccggtgaacaaaaacaaatccatttggttgacgcaggaaggcttggaacggggcaggcaaattgccgatcggttgtttggcgcggcacctgaagcgctcgcggggccataagcccagctacggagtgttaaaccgcgcttcatgcgtttatcctcaagactccccgacctgccaacccggagccgccatggacctcgccaccctcgccctcttcctccccgcctgcttcgccctgaacatggcccccggccccaataacctgctatccgtgagcaacgctacccgctatggctaccgcacctcctgtctcgccggtctcggccgtctgctggccttcgccggcatgatcgccctcgcgtccgctggcttggcggtggtactgcaaacctcggagttgttgttctacgggatcaagattctcggcgcggcgtatctgttttacttggcatatcagctatggcgcgcagacccgcagcaggtagaaaccgcgacgagcaaggtaggcctgtgggccttggcgcggcaggaatttctggtggccgcgggcaaccccaaggcgatcctgatcttcaccgccttcctcccgcaattcgtggtgcccggccaacccatcaccgcgcaatttgccctgctgggcgcgatgttcctggctttggaatgggtcgccatcagcgcctatgcctatatgggcctgcatatgcgccgctggtttgccgagcccaagggcaagcgcctgttcaatcgctgctgcgcgggtttgttgtcagcggcggcggcagtgttgttgactgcgcgcagggcataaccgaggtgggagtacccctggcagccgacgccgatcgcactgtgccccgctcccacagggaatctgtgccaggcaccgattttgacggcaatgcatgaccaatgtgggagcgggcttgctcgcgaaggcggcctggcagccgacaacgattcaactgatgcccaagttgcgtagatacctgtgctatctcaacggcaaaccatacctcacctccaccagcgccacaccgcccctctcaagatcgcgctcagtcccggcctcctccacacaccccgcccggcgataaaatcgaatagcccgttcattaccggccaagacccagagcgttaaacgctcatagccttgcgccaacagatcctgcaagccggctttccacaaggccagcccgacgccggtgtgccaatgctcggcgagtacgtagatggccatgacctcaccagcatttgcctgcacggcgtcttcgtcacggctggcgccgacggatatcccgccgacaatctgctggcccacctcggcaacccatacagtcgattcacccaagacaagcgagcgaacccaatgggcttcgcgcctagccagcgttgcttgcaacccgctcaagaactgggcaggcatcaggtcacggtaggcatcctgccaactgctgatatgcacctgggcaatggcttttgcgtcggcgggtaaagccctgcgaatcatggaaatgctcctgaaatacggttatttcagtatgcatgcccgtcgatgacagaaagccctgcgctgaacatggcccgatatcaataccccccccaatgtaggagcgagcttgctcgcgaagaaattcaacgataacgcgggcttgctaagtgaacgcggcgcctgtgggtttttcgcgagcaagctcgctcctacagctgcaaggcaattccggcgtcgatgaagaacgccgggccccgcgaaaaaccgccagccaacatcagcccttggtcaaatccaccaaaggcgtctgtcgcacctcagtctcccgcccaccctgaatctcgctgacctgcttcaaagccttatcaacagccgccttatccgccaacaagctgtagctgatacggaactgcttgtgttccttcgccccgatcgtaggcaccagattcaatggccgctgataacgacggttgtacgaaaaactcgtccccggctccaaccccgtgacatagccctgcccttgggtatcggtgttcttccacagggaaaacaccggcagtgtctgcgtattgaaacccaccgaaacccccaggctgcccgccttgttatgcaacaccgtcaaggtatcgcccttggcatcggcatacggcaccacgttatagaccgtctcgtcatagtccttggtcggtgcgcggtaggtttgccagtcggccagttcgcccttggccttatcgttgaacggcgacacctgcttcaccggcgcaacgaaacgcgcgccctgctccaggaacggggtgctgaagttactgtgataaagcgcctggtattccttcggataatcgccattgttggtcagcgtgtcgttgagggcgaacaccacactgccaggctcggtgaccagttcggtcgcaacagagaaatcgaccttcttgaacgcctgctctttcaactcgccgcgcagggagatggcgtagggcggtttttcatcgatatgcagggtgactttattcgcagggatattggccgcccgcccgtgcagggtcagcaactcgccgttgtcgatgccaggatgcccgacccattcgtagccgcagcgggtgaccagctcattgaaaccctccagccaacccaaaccaccacggccattgagctcgatgaaggacggattcaccacttccttgaccggcgaatcccagcccatacgcacatctccaaccgacgcctgcaacacgttcatgccacgcgtcggcaccactgagagcttcatcgtgccgttatcgatatcaacaatgctcacaccctcctgccgaccaccgtgcaaggtgcgcagggtaacgctgaaaggtttgtcggtttggatgccgagctgctggctggtgacctgccagttctgggcggctttgtcggtatcgaggagtaagtaatcccaggccagggcgtgggaggcggcagagaatgcgctgagggcaacgatgagttttagcggggtcatgacggacgcctttattggagttgtttgcgatttataaactcgatgaaacgtttcagcaagcttaaaaagcaagacgacgcgtggaaatgccaggaaggagacgagactcgcctaggggagactggagcaaaatagagggatgagcggcgtatgagcttcagaccatccgtgccggttacaaccttggcgttgctcgtcggctgcaatgacgcatatagtcccccggacgcccacgtggcgaccaggtttggcgacctgattatcggtaaatcattgcatttatcggagtttcaaaaatggaaagatatatccctcttactggcatcgaacgggttccagcctccctgctcattgactcgcaagcaccgctcgacgtgcttcaagcgatggctgactatcgtattcgtaccgtgactcaagtattggaaaacatcgcttttcggggcgaggtggaggctgactgcgtggtgctttcggattttgcgcagttactggcgggcgattcaggtgtcgccgaaacataaaaactgtacgcccgaaagtcacatcctccccattgaactttccaaaaaaatgatgtcaatttgattgctcattacagcaacaagatcatcttggataagtcagcgtcaggctatttactgacatcctatggagagagtgatgagagccatcattgcgatgttattgatgttgagtacctacgcccatgctggttgcggcaatatcagtgacagcgatcaacgcgcttattgcgaagccaaaaccaatggccaaaactgcggcaatatccggaacgacgaccttcgggccacttgttcggcgcaaatgagcggtcaaagctgcggcaacattaaagatagcaacttgcgtaacgaatgtgatgccataacgcgttgatctccggatcacgcgggaccagccactcttaatcgacgctggacccgcgtacttgaactcgtcagtttttaaagcgcctgccgacttcttatcctcgtggccacctctgccgaatcgataccgaagttcagatgtacctcaccaccctctcccttttcgtctccgcctcctacaccccttttccaaaggttccaaccgcttactcgtttccatacgcacattgtgcacgcacgattttcaagtatgacgcgaatagcggctccgaaaagtagccgatcataatcgagccacttcggatggtgaccgtcaatctgagatcacgggttgccgcttggctgatgtggaggattgagtatcggcaaaaggcgcgtgcgacaaagcgaaagctgctgactgggaaatgccaagttcgccccgtcacgattcagctgtggtgattgaccggtgattgatggcgagcttatttcctgatctggatggtttcaaggcaatgagcgaatcggagcagtagtcaggcgctagcgcttttcagattcttcgataatcaggtcgatagctttcctggcgacgggtgacagggtgcggtctgcatgaaatacgatggtttcttggaagtagcacaaatgtgctggtaccgctggttgaatgaaggggaggaggttaaccagtgcaccactctccagatcgctttccacccacgattgccaagtgatcagcagtgagtcgcttgtgagcgttgcatggcgcagccaactcaactcattgcaaatcagagcccaaggcaaggacgttccctggggtagcccgaacactgctcttgcatgggcatcgtcggtgttcacagcgttccacggatgggcgagtatctgctcatacgtgactgggctagcctgctgtgccagcgggtggtcacggcggcagaagatggacgctggctgtgggggcaaatgcctgacggcaaagcgtgggtcggtttcccggtcgactcgctcagaggcgaccacgaactcgatatgctccagttccaggcgttggatcaagtgacgccagtaattgacctcgatgttcaccatcaacttgggagcactctttcgcagcgccgccagcacattcggcagtgtgatgttggcggccatcatgcccgcaccgaaactcaaagcccctccttgggccccggcaatgtcattggcctctgcaaccagtttgctggcgcagctcaacagttcacgcgctcgtgaaatcagttgatgacccgcagacgtcagcgtcactgagcgagtgtccctgtcgaacaggcgtagccccagatcagcctccagagattgaatactgcggctgaacgccgtttgcgagaggtgagcgcgttccgcggcccgtgagaagtgcagctcctcgcccagaagcaccaggtgacgaactcgcttcaaatctattaagtcgctcactgcattaatcgctctttataattgcattagacgcttgtatctcattccaagagacttcgccagagctcgcatcgctcagttggcaagcgcttgtactgccaagcccataacaacaaagaagtggcgatacccatttggtgtcaaggcgatcgcggccgagttcacgcccaatgccttgtgccagtccggtgtgagcagacagtcacaaacgctacgtgtgactttgcggccttcgggccgcctttttagaagccgaacaactgacaataagaaggtgaaacgcatgaaatcgagaaaagccatagtgcatgctttgttggacagcgcagtgctgtcctgcgctgttgccgaggccgctgtccagccacagtttgccgatgcccaggccagcgatcctgtcgtcatgggctggatgcagggcaccccgccggcccccgaaaaaacggtacgattcgaaaattttctgcagttcccgcagacgcgctgggcgttctcccatatgcgcgaattactgccgaccgtgcaggtttcgcgaggcattggcgaggtcagcctattacctaacgccaagcgcacagatatcgacgccgtggcgttcactccgcttggcagtgatcgcaccatgacctgggagcagtcactgacggccaactacaccgatggcattctggttatgcatcgcgggcaagtggtttatgaacgctactttggcgggctgaccgaacaggggcagcacgtcgcgatgtcggtgaccaagtcctttatcggcacattgggggcgatgctggtcgaggaaggcaagatcaatccgcaagagaaggtcagtacctacgttcccgagctgaaaaacagtgcttttggcgatgcaaccgtacgacaagtgatggacatgaccgtcggcgttcgctactcggagaattacgcggacaccaaggcagagatttgggagtacgtgagggcaggtcatatgctgcctcgcccgactggttacagcggcgctacctctctgaccgagtacttggagaaacttcagaaagagggcgagcacggtcaggtctttgcctacaagacggtcaataccgacgttttgtcgtgggtgatccagcgcgccaccgggaaaacgatcgcggtcaatttgcatgagcgaatctggagaaaactgggtgctgagcaggatgcatacctgattgccgatgatgtgggcaccgctttcaccggcggcggtttcaacacctcgttgcgcgacctggcccgctttggcgaaatgatgcgcctgaatggtaagttcaacggccagcaaatagttccaccgaacgtgattgctgacatacgcggcggcggcagccaggaaagttttgccaaggcgggtgaaaagctgatgccaaactggagttatcgcaacatgtggtgggtgtcgcacaatgaccatggtgcctacacagcacgtggtatacacggacagggtatttatgtcgatcccaaggcggagatggtcatcgtccgctacgcctctcacccactggcgtccggcgacaacttcgatccaaccaccttcccggcctaccaggcgctcgccgaacatttgatggccaccacacagtagggggtatggatcaagtgcgaggagttgcactggcaaggtgactctgatccgcgcgcgctgaacaagatcgtgttgaaagagacctcgttgaaagacgcattgacctcgggtgataccaatatagacggggcgcaaagctgctggaggaaatggcgtcctacttggacaacttcgatttctggttcaacattgtgacgctgtaacgcaatccagtcatgtcgcaggaagctttgcgacaaatcaatcggccctggaggatggcagtgtgcgaaagcgctgccgtcattctggcaaaaatgatcagcctttcctaattcgatttcctatcagctctgacgaccgtttttagccgattactgcctgtcccgaggggctgttaccgacccgatgctgcccttcgtgaaaggcagcaatcggccagaagcggtcatctaggtggggcgtcatccggattgattttgtcttcgacgtcaaatctactcagcaatgcggctccatccgaaacaccaagaatctgatcaattacggctattttctgggtcgcacagtcgagttgaaactcagcgttgctgtatgcagcctccgcctcattgtggagcgcataggccatatgggccgcgacacggacgctcattggagcatctacatcactgcccagataatcagcaagcaacgtcctgatctctatcagtgcaagcgcgagtagcctagtttgagcagtctgcataaagatatcctgggtattacaacaaatgtgcgaacggatttcgcgaggttacataaactttcagactgtcaaaagcgaaagaccgctttgggtcgaaagctgccggtcagccccctcctccccaaaaatcccgcctctcaacccccacacctctccaccaaaaaatccacaaacgccctaacccgcgccggcatcgcccctccccccacaaacaccgcatgaatcggctccacatccccaggattaaactcctccagcaacaccaccaactccccccgcctcacctcctccaccacactaaacgccccaatcctcgccacccccgcccccagcttcgccaactgcgccaatgcctcgccgctgttcccttcaatcgtccccgccactttcagcgaaaactcccgcccctccacccgaaacggccaatccggcgccgcccggcggaagttgaagcgcaggcagttgtgctgcagtaaatcctgcggcgttacgggggtgccatgccgtgccaggtagtccggtgaggcgacgataacctgcccggtagagccgataaggcgagcggtcagggggctgtcggcgagggggccgaagcggatggcgacgtcggcctggccgccgaggatgtctacgacttcgtcgccgagcatcaggtcgacgacgatggcggggtagcgggcgctgaaggcggcgatcagggggacgatggtcatgcggccgtgggccagtgcggcgctgacgcgcaggcgtccgcgtggggcgccctggtcggtgatggcgtcttcgacttcagccatgtcggcgaggatgcgccgggcgccgcgcaggtaggcttcgccttcagcggtgaaggtgatggcgcgggtggtgcgcagcagcagacgggtgccgatgcgctgttcggtgcgggtgatgatgcggctgatggccgatggggtcagtcccaacgccctggccgcgcccgacaggctgccgtgctcggcgaccatggtgaagacttccatctctcccgaacgcccgccgatgtccatttgtgcctcctgcgcaaagctgtagttcccaaccgagggctactgctgcaaaaggcaggattgtagcatttggctcacagatgaggagtcacccatgcgtatcaatcccccccttgtagcattgtccgtcggtgcctttggcatcggggtcacagagtttgcccctatgggcatgttgcccggtatcgccgctgatcttgatgtctccattcccgctgcgggcctgttggtgagcgcctacgccatgggcgtgttgattggcgcgccgatcatgaccctggcgacggccagggtgccccgccgttatctgctgatcgggctgatggcgatttttaccctgggtaatttgctgtcagcgttggccagcaactaccagacgctgatgatcgccaggctggtgacgtcgcttaatcatggagcgttctttgggattggctcgattgtggccgcaagcctggtggcgcccgagaagcgcgcgggcgctgtggcggcgatgttcatggggctgaccctcgcaaccattggcggcgtgcccctggcgacctggtttggcgagaacttcggttggcgtaccgcgttctggggcatcagtgggctcggcgcggtggtcatggcggcgctgtggtgggcattgcccaatactcccgcgcccaagggtggcgggctgatggcggaaatccgtgtgctgggtcgcgggccggtgctggccgcgttggcgctgaccgtggtgggctcgagtgcgatgtttacggtattcacctacatcgcgccgattctgcgcgacgtcacccacgcttcgaccaacttcgtcaccgggatgctggtgctgttcggagtcgggctaaccctgggcaatgtgtggggtggcaagtctgcggaccgctcggtggaccgcaccctgatcatctcgctggtggtgttgattgccgtgctgttggccttctcggtccttatgcagtggccgctgcctgcggcgctgtcgatcctgctgtggggcgctgccagctttgccctggtgccgccgttgcagatgcgggtgatggaggcagcaaaggacgcgcctaacctggcttcggcgatgaacatcggtgcgttcaattttgggaatgcgattggtgcggcgttggggggtgcggtgatcaatgccgggttgggctatccggccatttcactggcaggcgcgatcatggctgggctgggtttgctgatggtgctgggtttgggctggcgtgcgcggcgtgcaggtttgcggacttgcccggaagcggtgcaagcgtaagtacacgctggaaagccccacccaactgccttataactacgccctccagtcaaggagacgcgtaatgaaaaccatggtagttggcgccagcaaaggcctgggcaaagccctgatcgaagggttgggcgaagccggggatacgctgatcggtgtatcccgcagccgtcctgaccagctcaaccacaaggctgatgtgcaggtgcactggatcgaagccaacctggccgaacccgccaaagctgctcagaccattgaagcttcggtggtcgagagcgggctggataccctgatctacaacctgggtatctgggaagagtttgccttcgatccggcgtacaactttttggccgacagtgatgagcaactcgaagccattgtcacgtgcaatatcacctctaccctgttgctgatcaaacgcctgctgccggtgctgctcgacagcgccaacccacggatcatcctgaccggctccacctccggcctgccgcaaagtggtcgcccagaggtggccttcggtgcctccaagtttgcgctgcgcgggattgccgatgccttgcgtgaaggttatcggcatcagcgcctgggcgtgacctgcctgaacctcggtgacctgaacaccgaagacccgttgagcacaccgatcacagtggcggcgcaacgcggtgaaggtcagttgatccctgtacatgacgtggtgcaggtggtgcgcatgacgctgagcttgtcctcggccagcttcgtcaaggacatcaccttgccggcgattctggatgagcggttttagacggggaagaacgtctgtggctatcgtctagacttcatgcacctttcaacccgaggagccttgcgatgaacaacaagaatacgatttgcctctggtacaacggcgatgccctggaggcagcgaccttctacgccaacaccttccccaacagcgaagtaaaggccgtacaccgtgcgcctggcgactacccggccggcaagcagggcgatgagttgaccgtggaattcaccgtgctgggtatcccctgcgtgggcctcaatggcggccccatgttcaagcacagtgaggcgttttcctttcaggtctccacggatgaccaggaggaaaccgaccgcttgtggcatgccatcatcgacaacggtgggcaggcgagtgcttgcggttggtgcaaggacaggtgggggctgtcgtggcagatctcgccgagggtgttggtcaatgcagttaccagtaaagatcctgccgtcgccaagcgtgcatttgaagcgatgatgaccatgtccaaaatcgacatcgctaccatcgaagccgccattgccgggaactgaactgtgggagcgggcttgctcgcgaaggcgatgtatccgccagcacatgtgaaaactgacccaccgctttcgcgagcaagcgcgctcccacatgaaggcataggtatatgctcaaccgtaaccacgatgcgaagcgagccgctcttgatcttgctctgcttttgatcttaagcgccccgtcaaaccacgctggccggaattcgacagggatttggggcggcctcccaaatcactggcggattacgggcacaccgagcctaagcgaggtgccgagtggtggggcaagagccttttgcttacttttggctgggccggcattccggctcttttcaaaagtgagccgctgtcagagcggaaccctaagtggccgttacctaaataacggatatgtactcggcctgagccaacattccggcagactttcaggccgtcttcgcaggcaagccagctcccacatttcacagggcatcaggtagataagcgttggctgtcaggccgccttagcgagcaagcccgctcccacagtttgattgcgcgccttccccccatgcggcaaaaaaagtcatccaacggacgcccagttgcgacaccggcgataccggcctatgttccaagccatgctgtttttttgctgtccctcgccctacgcccatcccgtaaccaggagacgacatgcccacgccttcccgccctgccgtactcgagctgatcggcaataccccgctggtcaaggtcagccgcttcgataccggcccctgcacgctgtttctcaagcttgaatcgcaaaaccccggcggttccatcaaggaccgcatcggcctggcgatgatcgacgctgccgagcgcgatggtcgtttgcgccctggcggtaccatcattgaagccaccgccggtaataccggcctgggcctcgcgctggtgggccgggccaagggttaccgggtggtgttggtggtgcccgacaagatgtccacggaaaaggtgctgcacctcaaggccatgggcgccgaggtgcatatcacccgctccgatgtgggcaagggccatcccgagtattaccaggatgtggcggcacgtttggccaaagatattccaggctcgttcttcgccgaccagttcaataacccggccaaccccttggcccacgagaccagcaccgcgccggagatctgggcgcaaacccagcacgatgtggacgcgattgtggtgggcgtcggctcggccggcaccctcaccggcctcacgcgtttcttcaagcgcgtgcaacccgagttggccatggtactggccgacccggtcggctcggtaatggccgaatacagccgcagcggcaagttggaaaccccaggttcctgggcggtggaaggcatcggcgaggacttcatcccctcgatcgccgacctgtccagcgtgcgccacgcctactccatcagcgatgccgacagcttcgaccacgcccgccaattgctcaaggccgaaggtatcctcggcggctcatccaccggcaccctgctcgccgctgccttgcgctactgccgcgagcaaaccgaacccaagcgcgtggtgacctttgtctgcgacaccggcacgcgctacctgtcgaaggtttacaacgaccagtggatgaacgacgccggcctgttgcagtacaagcactacggcgacctgcgtgacctgatcgcgcgccgcttcgaagacggccgggtgatcagcgtgagccccgacgacaccctgctcaccgccttccagcgcatgcgcctggcggacgtgtcgcaactgccggtactggtcgatggccagacactggtgggcgtcatcgacgagtccgacatcctgctgggcctgcaccatgacgccgcggacttctccatgaccgtcgccagcgccatgaccaatacgctgcacaccctggcccccagcgccagcctggccgaacttcaggccgagctggatcgcggcctggtcgccatcattgccgacgcctcaggcttttatggcctgatcacccgcgtcgacctgcttaaccacctacggagatcccttgcatgagccagcccgataaaagcgcgtttgccacccgtgtgatccacgccgggcagtcacccgacccgaccacgggcgcgctgatgccaccgatctacgccaactctacctacctgcaagacagccccggcgtacacaagggttttgactatggccgctcccacaaccccacgcgttttgccctggaacgctgcgtggccgaccttgaaggcggcagccaggcgtttgcgtttgcctcggggctggcggcgatctccactgtgttggagctgctggatgctggcgcgcatatcgtctcgggcaacgacctgtacggcggcaccttccggctgttcgacaaggtgcgccagcgcagtgccgggcaccgcttcagctatgtcgacctcagcgacttgtcagcctttgaagcgtcattgcaggacgacacgcgcatggtctgggtcgaaacccctagcaacccgctgctgagcctgaccgacctgcgggccgtggcccgcatctgccgtgcccgcgggattatctgcgtggccgacaacacctttgccagcccctggatccagcgcccgctggagctgggcttcgacatcgtggtgcactccaccactaaatacctcaatgggcattctgatgtgatcggtggtatcgctgtggttggcgacaacgctgaattggccgaacgcctgggcttcctgcaaaactccattggcgccatcgccgggccgttcgatgccttcctgaccctgcgcggggtaaaaaccctgtcgctgcgcatggagcgccattgcagcaatgccctggacctggccacctggctggaacaacagccgcaagtgtcgcgggttcactacccaggtttggaatcccacccacagcacgacctggcgaaacagcagatgcgcggatttggcgggatgatttcagtggacttgaacagcgacctggtcggcgcgacgcgctttctggaaaacgtgaagatcttcgccctggccgagagcctggggggcgtggaaagcctgatcgaacacccggcgatcatgacccatgccagcattccagcggcgacgcgggcgcaattgggcattggcgatgggctggtgcggctgtcggtgggggttgaagatgtggaggatttgcgcgcagacctggcgcaggccttggcccacatctaaccgccatgatcgttcccacgctctgcgtgggaatgccacccgggacgctctgcgtccccaagcgtgacgcagagcgtcaccggatgcgttcccacgcggagcgtgggaacgatcagtgtgggtcagccttgggtgatgttggcccgcgctgcatgcagcttcttgtagctatcgatcaagcgcaaatgccggtccaggccttccagcttcatgctggtcggcgtcagcccataaaagcgcacgctgccgttaaccgaaccgatcaccgcgtccatgcgctcatcaccgaacatgcgccggaagttggcctcgtaatcggccagttccaagtcgtcatccaactccatctccagcaccgcgttcatcgcctggtaaaacaacccacgctcaaccgtgttgtcgttgtactgcaggaacatctccacgcactccttggcctcctcatactgctgcaaggccaggaagatcagcagcttgagttccagaatggtcagttggccccatgccgtgttgtcatcgaactcgatgccgatcagcgtggtgatgtcggtgtagtcgtccagctcgctttctatcaggcgctcgaccaacgcctgcaactcctcctcgttgaggcggtgcaggttaaggatgtcttcgcggaaaaacagcgccttgttggtgttgtcccagatcaggtcgtccaccgggtagatttccgagtagtccggcaccaggatgcggcaggcggtagcgcccaggtgctcatacaccgccatatacgattctttgcccatgccttcgaggatgccgaacagcgtggcggcttcctggacattggagtcttcgccctggccggagaagtcccactcgacgaactcataatcggactgggcactgaagaagcgccacgacaccacgccgctggaatcgataaagtgctcgacgaagttgttcggctcggtgaccgcctggccttcgaaggtcggctgcggcaggtcgttcaagccttcgaagctgcggccttgcagcagctcggtgaggctgcgttccagcgccacttccaggctggggtgcgcgccgaacgaagcaaacacgccgccggtgcgcgggttcatcaaggtcacgcacatcaccgggaattcaccgcccagggacgcatccttgaccagcaccggaaagccctgggcttccaggccttcgatgcccgccaggatgcctgggtacttggccaacacttcggcgggtacatctggcagcgcaaattcgccttcgatgatttcgcgcttcaccgcccgctcgaaaatctccgacaggcactgcacctgggcctcggccaaggtattgccggcgctcatgccgttgctcaggtagaggttttcgatcaggttggacgggaaatacaccacctcgccatcggactggcgcacgaacggcagcgagacaatcccacgggcctcattgccggagttggtgtcgaacaggtgcgaaccgcgcagctcgccctcgcggttgtagactttcaggcagtaggcatcgaggatttcactcggcaactcatcgttggagcccggctggaaccaacgctcgtccgggtaatgcacgaacggcgcgttggccagatcctcgccccagaactggtcgttgtagaaaaagttgcagttcaggcgctcgatgaactcgcccagcgccgacgccagcgcgccttctttcgtcgcgcccttgccgttggtaaagcacatcggcgaatgggcgtcgcggatgtgcagcgaccacacgttgggcacgatattgcgccacgaagcgatctcgatcttcatgcccaggccggcgagaatcgccgacatgttggcgatggtctgttccagtggcaggtccttgccggcaatgtaggtgcccgcctcggacgtggagttgggcatcaacagcgcctgggcatcggcgtcgaggttgtcgacttcctcaatcacgaattccggcccggcctgcaccactttcttcacggtgcagcggtcgatggaacgcaggatgccttggcggtccttgtcggagatgtccgcgggcaattcgacctggatcttgaaaatctgattgtagcggttttccgggtcgacgatgttgttctgcgacaggcgaatattctcggtgggaatattgcgcgtctggcagtacaacttcacaaagtacgccgcacacaacgccgacgaagccaggaagtagtcgaatggccccggtgccgagccatcgcccttgtagcggatgggctggtcggcaatgaccgtgaagtcatcgaacttggcttcaagccgaaggttgtcgagaaagttgaccttaatttccatgcgggcacaccagaataacgagctaaacaaattggccgccattatgaagcgtttcgccgggaagtctcagggatttgcgtatgggctgccgatcggtgctaacttccaactagttagataatgttcacctctgccaggacaggccatggaaccgatagcgacgaacgccgcactgttgatcatcgatatgcaaaaaggcatggccgatcccacccttggccgccgcaacaacccagacgctgagctgcacatacagcaattgctcaatgcctggcgccaggcgcaacgcccgatcattcatgtgcggcatatatcccgcgctgacgcttcggtgttccggccaggccaacccggctgtgagttccaggatgcgctgcaccccctggcccacgagcatgtggtggaaaaaaacgtaccggatgcgttcagcgccacgggcctggagcgctggctgcacctgcgctcgatccagcagttggtgatcgtcggcgtcatcaccaacaattcagtggagtccaccgcacgctcgggcggcaacctggggttcgacgtgatcgtggcggcggatgcgtgttttaccttcgaccaaaccgacttgtcggggcggctgtgggcggcagaagatgtgcatgctttgtcgctcagcaacttggcgatggactatgcaagggtgttccagacgagtgaaatcctggccaatcattaataagcaatgcagacatgcatcagggcaaacgcacgatggcgaccgcttgccggcctggacggttaaaacaccccggcatcctccagcatttgcggcaacgcttgcggccataccgtatcgctcgttgcgcgcagcgcatctgccgaccaccagcgatggtccgccatcacctgtgcctcctgctgcgtccattcggccctggataacgcctcgctgggcgcatgcacaacgaagtaccgctcaaccgccagcaccgtttcgccgcagggtagcatcaaggtcacgttgcgctctgctacacattccccgacgctgctgaccgtgatacccgtctcttcgcgcaactcacgaatcgcggcgctgtgaaaggtctccccggcctcaacgccaccgcccggcgtggcccagtaatcctggccggccaaggcgccttctttgtgcacgaagcgaaacagcaacacttgctgtgcagggtttatgaccagtaatcgtgccgctttgcgttcacgcatcagattgattcctttctatgactgctgaattcatccagctcagaaacgcccgcaggcgtgtcgtaaatgcctggccctcggcgctcgggttgcgtgcctcaaacaggaagtaggcgatttgcacgcgcatggtcgggtaatgctgaacaaacaggccgacgtagtcttccagggtttgcggccaggtttgcgcatcttgcgctcgcagagtgtgggtggcgcggatcaaggcccgcgatgcttcccgctgcaagcgatggcgtacctgctcagtgctggcctgttcgatacctaccagatacgccgtgagcgcctgttcaaaatcgccgttgaccgccagggcaatggcgcaggacgggcgaaacggttcgaagtgcagtgacaggtcttcgccccagatacagcggcaatgatgtttgagccagaagccccaactgtttcggttctcgggcgccaacacctgggcgtggtgaccgatgtcgaagtcgatcttggtgacttggggatgccgttgctccaaggcgagtcgggccgactccaattgttcaagcacgggcgcatccggtggctcgaccagtatcagcgaaaggtcaagatcagaaacgccgatctcaccttcaccccgtgcgatgctgccatataggtaaatcccgtgcagccccagttctggccgggacaaggtagcgcagatgtccgtcagcaggggctggaactcgggttgtataggccgatcggcaacggtgaggatatagccgtcgacatcaatgcctgcagatttttgggtgttcacgggcggtgcacctcaatcaccagaccttcctcttcactcggcacactgaaatggcgagtgatcaggtcgaactcggcatcggtggcggcaaaatcgtgctcaccccgggcgtttcgcgcgtgcaggcgcgcacgacaggtggcatcgtccagctccaggtaatgcaggcagtgcggcaccttggctgcctgggccaggccgagcaaccattgacgattgacgagggtgttggccggaaaatccagcaccacattgacgccgcatgccaacagatcgatcaccagcggctcaagtaccccacgaacccgctgggcacagcgcaggtagtcggcaatgctcaggatctcaccagggtagagactggccagccactggtcttcgctgagcacaatggccccatgctcggcagccagggttttggcgagtgtggacttaccggaggcgatcttgccgcataacaggtgcagggttggcataaaacgattccttgttgtggccaaacaggatgagtcatgacgctggcgtcgtaaacacatccaggtacatctgccaggaaacatcgccatctctcaatgaactttctgacaaatgacaggctcctttcctatgcgaagtcagcgcgccctgagtccagggtgcagaacgataaggagccgccaccgacatgactaccctccccacttaccccgtcgtcaggcccgggccgttgcacgggactttgcttgccggcaccgtgccgttgtttctcggagccttgctcagtgatatcgcctacggccagacctaccagatccaatgggccaattttgcctcctggctgatcgctggagccttggtgttctgtggctttgccctgctgtttgcgctggtcaacctggtgcgtgccgaacacaagggcggacgcccggtggcgtacttcctgctgttgctgggcacttgggtgctagggctggtgaacgcctttcagcatgccaaggatgcctacgccatgatgcctgctggcttggtgctgtcggcgattgtcaccgtgctggcgattgtcgccacctggatcggcttgaccaacctgcgctcaggagctgcccgatgaaaccactcaacacactgaccctgctcagcgccgccctgttgctgagtgcctgtggcggcgaaggtgacaagacccaggcacgcggccctgaccccaaactgcccgagcaacaaagcagcctgttgccgagcatgaagattgccgagcccacaccgtggggcgaacaaaagcccaaggtgcccgaaggctacagcgtgaccgccatcgccaaggaccttgcgatcccgcgccagaccctggtgctgcccaacggcgatatcctggtggccgaaggccgtggcggcagcgcggccaagctcaagcccaaggacgtgatcgccagtgtgatcaaggcccagggcaacacccaggtcaaaggcggcaaccgcattacgctgctgcgtgacgccgacggtgacggtacctatgaactcaagaccgtgttcgccgataacctcaacgccccttacggcctggcattcgccgacggcaagctgtatgtggccaaccaggatgcactggtgcgttttgactacgccgacggccagaccaaggccagcgcgccaccggtcaaagtcaccgacctgccggcgcagatcaaccatcactggaccaagtcgttggccgtgagtgaggacgggcgtcagctgtatgtgggcatcggttccaacagcaacatcaccgaacgcggcatggaagtggagatcgaccgtgcgatggtctggcagatcgacgcggccaccggcgcgcacaaaccctacgccacgggcctgcgcaacccgacggcgttgaccatccaaccgggttccgggcaactgtggacggtggtcaacgagcgcgatgagctgggccccgacctggtgccggactacctgacgtcggtgcgcgaaggtgccttctacggctggccctacagctactggggccagaacgtcgacccccgcgcacaaccgcaaaacccggccaaggtggctgcggcgatcaagcccgattacagcctgggttcccacgtggccgcgttaggcgtggatttctccatccccgccctgggtgaaaaattcgctgacggcgtgtttgtcggcgagcacggcagttggaaccgnnnnnnnnnnnnnnnnnnnnnnnnnnnnnnnnnnnnnnnngtgatttccttgtggcgcggcaccagcgtcttcatcacgctccaggccaccaggtaagccagggcgcagatggcgaacatgatcatgtagccggtatggatgtcgttgatggacttgtaatagtcgaacacccaaccgccgatcttggtcatgagcacgccgcccaagccaccggccatgccgccaatgccgaccaccgaggccactgttttctgcgggaacatgtcggacacggtggtgaatatattgcatgaccacgcctggtgtgccgaagcgcccacgccgatcagcagcaccggcacccagaagctgaggtaacccagcggctgcgccagcaacaccaccagcgggaacagcgcaatcaccagcatggctttcatgcgcccgtcatagggggcatcgccgcgtgccatgaagtagctggggaaccagccgccgccaatgctgccgaccatggtcatgctgtacagcaccgccaatggcatcacgatatcggcgcctttcatgccgtattgggcagacaggtaggtgggcagccagaacaggaaaaaccaccacacgccgtcagtcatgaacttgccaaaggcaaacgcccaggtctggcggtaggtcaacagtttgaaccaggagactttcttccctgcggtgcccgtcggcgccggggtgaacggctgtacggcctggtcgctgcggatgtaggccagctcttcaggcgacagacgtttttgctcttccggtttttcgtacacggcggcccacacgcctacccacacaaaacccagcatgccgatgaccataaaggccgcctcccagccccacaggccggcaatcaaggggacacagatgggcgccaggatcgcgccgacattggcgccggagttgaagatgccggtagccagggagcgttctttcttggggaaatattcggcagtggccttgatcgcgatcgggaagttacccgcttcgccaatcgccaacaccgcccgtgaaagcatgaagccggcgatcgacaccgggatcaccgccaggccaatggcgccgctgacggctgcaataccctcgcccatcggcaccgaaaacgcatgcatgatcgcgccggtggaccagataccaatcgctactacataagcggccttggtgccgatcttgtcgacgaagcgcccggcaaacagcatggaaatggcgtagacaaactggaacaccgccgcgatgttggcgtaatcggtgttgctccagccaaactgcgtcgagagttgcggcgccaacaggctgagcacctggcggtcgaggtaattgaccgtggtggcgaaaaacaacatcgcgcagatcgtccagcgatagctgccgaccgcctggccgacacgaagggcactgatgggctcgttcagattcatggcatcactttttatttttgttaggtaggacatatgtaacgtcatatgtcgtcgtacaactacgagttttatagcgagacgcccgcgcagtgtcaatcgcaaagattgccgcttatcgaggatttacgtggaataggaaaatgtcaggcttgtgcagttgtaggatgacaaacccggagcaccaggctgggcgcttgaccggggacatcctccagcaggccaaaacgttgcatgccgagtttctccagtacgcggatcgacgcagcatgatcgggccgcaccaggccgaagacttctggtaaagacagggtgtcgaacgccagcgccagtgcatcccgccccagctcagtggcatacccctgcccccaggcctcgacggccaggcgataaccaaggttgatgcgccgctgcgtcaggtagttaagtggcgcaatgccgccaaatccgatgatgtgttcggggctctctttccgggcaattgcccaccagccgtaaccctgggatgcccattgctccagccagtgatccaatagccgttgtgccgcctcgatgttgggcagcgggccggcaggattgaacaaattggtctgtgcatcaccgaagatcgcgaacaatcgctgaacgtctgcgtgccgtggttggcggtaggtgagccgcgagtggctgctgggcatatgactgacttccctgttctatctaacaatgacaaccgcctgtgggagcgctcgagctttagcgaggccgcgatggcgatagttcaggcaacataaatgccaacagtaccgccgccttcgtagcctcgccggggctcgacaactcccacatttgatctgttttgccgctagttatgcataggcctcgaaaaccgaaggtttcatcccatgcgagaaaaaatacacaaagcggtgaattatttcgtgtccacttgtatctgaactgacagagcggtgccatcgtagcgatggcacctcccctgttcagcttttgagtggcccgcatgaaactacgtaaaaaacgcgtcaaacccatcggattgaaagacatcaccattgtcgacgacaacaagatgcgcaaggcgatcaccgccgccgcacttggcaatgccatggaatggttcgactttggcgtctatggctttgtcgcctatgtgctgggcaaggtgttcttccctgacgcttcccccagcgtgcagatgatcgcagcgctggccaccttctccgtccccttcctgattcgcccgctgggcggcctgttcttcggcgcactgggcgataagtacgggcggcaaaaagtcctggccgccaccatcgtgatcatgtccctgagcacgttcgccatcggcttgatccccggctatgcctccattggcatctgggcgccgatactgttgctgctgtgcaaaatggcccagggtttctcggtgggcggcgagtacaccggcgcgtcgattttcgtggctgaatacgctccggaccgcaagcgcggctttcttggcagttggctggacttcggctccatcgccggtttcgtcctcggcgcgggtgtggtggtgttgatctccaccgtgctcggtgaagcagaattcgaggcctggggctggcgcctgccgttcttcctcgccctgcctttgggcatcatcggcctgtacctgcgccacgcactggaagaaaccccagcgttccaacagcatgtcgacaaacttgaacagggtgaccgcgaaggcttgagccacggccctaaagtctcgttcaaggaaatcgccaccaagcactggcgtagcctgctgacctgtatcggtatcgtcgcggccaccaacgtgacctactacatgctgctcacctacatgccgagctacctgtcccacaacctgcactatgccgaaaacagcggcgtgctgatcatcatcgcgatcatggtcggcatgttgttcgtgcagccgttcattggctttgtcagcgacaagatcggccgcaagccgttcatcatcgccggcagcattggcctgctgttcctgtcgatcccggccttcatgctgatcaccagcggcaagaccggcctgattttcggcggtctgttgattctggcggtggtgctgaacttctttatcggtgtgatggcgtcgaccttgccggcgatgttccccacccacctgcgctacagcgccctggccagtgccttcaacgtctcggtactgatcgccggtgtcacgcccactgcggtggcctggctggtggagagcaccaacaacctgtacatgcccgcttattacttgatggtgttcgcggtggttggcctgatcacgggcctgaccatgaaggaaaccgccaacaagcccctgcgcggtgcggccccggcggcttccgacatggaagaagccaaggagttgctgcaggagcatcacgacaatatcgagcagaaaatcgaagacatcgacgccgagatcgccgcgctgcaaaccaagcgtgaaaacctggtacagcaacacccgcgtatcaattaataacctgactgtgcgtggtcgcgacctgcgaccacgccattggagcgttcagcatggtttcaagcgtcaccgccgcacacaggttactcagcgcagacgagcgcgccgccattgccgaaattgaagcaaccaccaacatcctcaagctggtcactcgtctgaccgggatgagattcgccggcatcgccaagttcaccgaccaggaatgggtggtgtgttcggcctacgacccgctgcaaatgggcatcaacgtcgacgacgtactcgaccttgaaactaccctgtgcagtgagttctgcatcaacccacacaccctgttcattccccagatcagccagaacggccgtttcgcgtcacgcccggtggtcaagcaatacgccatcgaaagctacgccggcgcgccgatcttcctgcccgatggccgcctgttcggggcgctgtgtgcgctggactcacgggccatgctgttcgacgacccgaacctgccggaaaccctgagcctgttcgcccggctgattggctgcatcttctacgctaatttgaccccggcggatcactgacacccgccctgccccgcagggtcgccatgtcgcgcttgggcggcaccccaaacagccggctgtactcacggctgaattgcgacgggctctcatacccgactttgaacgcggcactggagacatcctggtgctcgttcaacatcaaccgacgcgcttcattcaaacgcagccatttctggtattgcagcgggctcatcgcggtcagttgccggaagtgatggtgaaaggtcgccgcgctcatttgcacccgcgctgccagctcttccacccgcagggcggcgtcgaaattcaacttcagccagtcaatggccttggcaatccgatagccctgcccgtccaccgagcagatctggcgcagtcggccggcctggtcgcttttcaatagccggtaatgaatctcgcgctggatcaatggcgcgagtaccgggatagcctcgggttcgtccagcaacgccaccaggcgcgcgaatgcggccagcatgccgtcggtgaccgtgccgatccccacgcctttcatgactgcgcgctcacgcaccggcggcaagccaccctgggcgatcagctcggcgagcatgcgcaggtccagcttgaacgtcagccccaggcacggttgctcggggctggccgccagcacctcggaattggcggggatgtccaacgatgtcaccaggaaccgggacgtgtcgtaggggtagccctcgccgccgacccacaactgcttctcgccctgggccaccagcacgatgcacggctcaaccatgcacaccaccggcgcagcgggttgctcacgccgataaaagcccaggccggggatcggcatggcgtagtcgccgggcgacggcgtgcgcgaaccaatcgactggatcagcgcgttcaatggggtgggagtggacgtcatgacagaccctttcaatgcttcattgcactttacccgcacaagccacgggcgtcgtcacctggcactgaatctcagaggatcaggcaagtaatccactcaaatgcactacagaagccctgccgtcacccggaaaatgtgcggacacttcacaaggaacatccctatgaaacgcctcttgctcgccctgggtttgctggtgacttctctttcttcatttggagccgatatgtccaacggtgcggataacttctacagcagcaacacagtgacggccgaacctgtcaccttcaacaatcaatacggcatgcaggtcgcaggcacgctgttcgtgcccaagcacctggccccgggctcaaagcacgcagcccttgtcgtcggccacccgatgggggccgtcaaagagcaaagcgccaacctctacgccaccaaaatggctgaacagggtttcgtgaccctgtccctggacctgtcgttctggggccaaagcgccggcacaccacgcaacgcggtgttgcccgacctctacgtggaagacttcagcgccgccgtggactttctcggcactcgcccacaggtcgaccgggaacgcatcggcgccatcggcatttgtggcagcggcagtttcgtgatcagtgcggcgaagatcgatccgcgtctcaaggcaatcgccacggtcagcatgtacgacatgggcgcggccaaccgcaatggcctcaagcacggcatgaccttgcaacagcgccagcagatcctgcgccaggctgccaaccagcgctatgtagaattccagggcggcgagaccctctacaccggtggcacgccgcagagcctcacgggcgatccgatcggcgacgagttctacgacttctaccgtaccccgcgcggcgaagtcaccccagcaggcgcctcatcgcaaaccaccacccggccgacgctgaccagcaacgtcaagttcatgaacttctaccccttcaacgatatcgagacgatctcgccacgcccgctgctgctgattaccggggccgacgcgcactcccgagaattcagtgaagacgcctaccaacgcgccgccgagcccaagcaattgctggtcatccccaacgctggccatgtagacctgtacgaccgcgtcgaactgatcccgtttgacacgctctccaccttcttccagagccacttgcagtgagtgccgttacctctcaaccgcaacgctggggcgcggtgctggcgatgtcgctggcggcgtttgccttggtcgcctccgagttcatgccggtcagcctgctgacaccgctggcggctgacttgcagatcactgaaggccaggccggccagggcatttccgtgtccggggtgtttgccctgctcaccagcctggtgatcgcggcggttgccgcgcggatggatcgcaagcgcctgctgatggccttgaccttactgatgatcgtctcgggcagcgtggtggcgttcgcaccgaattacgcggtattcatgctcgggcgcgcgttgattggcctggcaattggcggcttctggtcactgtcggcggccacggcaatgcgcctggtcgagcccgcccaagtgccacgggccttggccatcgtcaacggtggcaacgccctggcgacggtgatcgcggcgccgctgggcagctttcttggcggcctgattggctggcgcggcgcattcttttgcgtggtgccagtggccgtgattgcgctggcctggctgtggctgagcttgccggcgctcaagcacagcggcacggcggccaccggcaatgcgctgcgcctgctgaaaaaccccaaggtgaccttgggcatgtgcgctgtcagcctgttcttcatgggccagttcatgctgttcacttacctgcggccgttcctggaaggcgtgacccgggtcgaggtgtccaccctgtcgctgatgctgctggtgctcggcctggccggcctggcgggtacggtgttgattgagcacttgctcaagcgccacctgtacccgacgctgattgccatcccgctgatcatggccggcattgcccttgcgctggtggcgttcggtggttcagcgattgtcaccaccgtgctgttgggctgctggggcctggtggccactgctgcgcccgttggctggtggacatggctggcccgcgccttgcccgacgacgccgaggccggcgggggattgatggtcgccatcatccagctggcgattgccgccggcgccaccgtcggtggtgtggcattcgacgtgagcggctatcaggccaccttcgagctgagcgccgccttgctggtgatcgccacgctgctcgcttacctggcatcgcgccgccctgctcatgcgcgcatggcgagcggcactacttgaaaaaatgactcggcgttttgccaaactgtttcttgaacatgctggtaaaagcgctggggctttcatagcccaattcaaacgccacatcgatgatcttctgccccaccgcaatgcgttccagcgccagcaatagccgcgcttgctggcgccactggccgaaggtcatgccggtttccttgcggaacaggcgctggatggtggtttggtccaaccccaaccgcgcactccagtcggcgacggtggaggcatcactcggctcgtcctgcaacgccaggcagatcgggctcaggcgtgggtcggcaggctggggcaaagacagcggcaaggccggcaggatggccagttcatcaagaatcaggtgcatgatccgcgcgtcgcgtgagtcctcggcatacggcggtttcaggctcaccgaggccttgatcagttcactcagcaacggcgagaccgtcaccgtcttgggctcggccggcaggttggggaagctgtccgggcgcacgaacacgctgcgcatctgcagcgtacccacgcagcgcagcgagtgaacttgaccgcaaggcatccaaaagccacgattgggcggcaccgtccattgcctcagggccgagtacaccaccatcacaccgccaatggcgtacagcagttggtgcttgttgtggctgtgttcggggatcacccagttttcggggtaatcggtggccgagctgatgacggcccagtcgccctcatcgatttctcgcagaaatttatccagtgatttgatcatttcgccctttttgcgatggtttctgcccgaattgcgcgagacaggcattggcgccgaatctagcataaacgccgagtccagatggagtggcggttcacatcaccgccgcccgcctccacgcctgtcagctgccttgtacggaatgcccgcatgtccacagtcacagcgtcacccgccgcaccttcgaccagcccgcaagtaagccccttagtcatgcgcgtcctgggcgcctgtgccctggcgcacctgatcaatgacttgatccaggcggtactgccgtcgatctacccgatgctcaaggccaactacggcctgagctttacccaggtcggcctgatcaccctgaccttccagttgaccgcctccctgctgcaaccgtggatcggctaccacaccgaccgccaccccaaaccctggctattgccggcgggcatggtgtgcaccttggtcggcatcttgatgctggcctttgtcggcaacttcccggcgatattgctcgcggcggcgctggtgggcgtgggctcatcgaccttccacccggaaacctcccgcgttgcacgcctggcttccggtgggcgctacggcctggcgcaatcgaccttccaggtcggcggcaacaccggcagcgccttcggcccgttgctggcggcggcgatcatcattccctacggccaaagccacatcgcctggttcggcctgttcgcggtgttcgccatcctggtgctgtacggtttgagccgctggtaccgccaccacctcaacctgttcaagctcaagcaaggcagccaggcgacccacggtttgtccaaaggccgcgtgaccttcgccctggtggtactggctgtgctggtgttctccaaatactggtacatgaccagcctgaccagttacttcacgttctacctgatcgaaaaattccagctgtcggtggccagctcgcagatgtacctgttcctgtttctcggcgcagtggccgtgggcacctttgccggtggcccgatcggcgacaagatcggccgcaagaaagtcatctggttctcgatcctcggcgccgcaccgttcaccctggccctgccctacgtcgacctgttctggaccgccgtactcagcgtggtcatcggctttatcatcgcctcggcgttctcggccatcgtggtgtttgcccaggaactggtgccgggcaatgtgggcatgatcgccgggatattcttcggcctgatgttcggcttcagcgggattggcgcggcgctgctcgggatgctcgctgaccatcacggcatcgagtacgtgtacaagctgtgctcgttcctgccgttggtgggtatcctcacggtactgttgccgtcgaccaaaggcgtttgacggttgctgtaggagcgagcttgctcgcgaaaaactgacagacgccgcgtatatcaggacacacgcgttatcgttgacgtttttcgcgcgcaagaacaagaactaggcgtccccctcgctcctacaggttatgactgaccctcacactgcgcccggtcttcaccgactccagcgcacaatcagccagatgcaacgcatacaaaccatcgcgcatactggtgggcaactcgcgcccctcattcagcgcatcgatgaactgcgtcagctcattgcgatacgcatccgcgtaacgctcaaggaaaaaatgctgcaacggttccaacgcttcggtgtgctcagcgctccaatggcgcacggtgctgggccggtgattgtcggtcagcagcacgccgctggcgccggaaacttctacgcgctggtcgtagccatacaccgcctggcggcagcagttgatatggcattgtttgcccgaagcggtgcgtagcaagaccatgacgctgtcgtagtcgtcgatctgctccagggtcgggtccaccaggcggctggcgaaggcgctgacttccacgggttcctcgccgagcaaatggcgagcagtgtcaaagtcatggatggtcatgtcgcgcaggatccccccggagtgttccaggtagtcacgcggcgccaggccagggtcgcgactggtgatgatcacctggcgcacggcgccgatctggccggcgtccagcgcctggcgcaggcgcagcatgtcggggtcgaagcgccggttaaagccaagcattaccttgccgccctggcgctctacggtttgcgcagcgctgcgcgccttggcgatgtccaggtcgatgggtttttcgcagagcaccgccttgccctgggccaccgcagccagtaacaggtcgatgtgggtgtcggtgggcgtgccgatcaccaccgcatcgatgtcctcgcggctcagcacggtggcgcagtcatacgcggcctcgcagcccaactgggtgctcaaggcatcgacacctgcgcgccagggatcggccaccaacaccagcgtggcattgggatgggcggcaacgttggcggcgtggatcttggcgatgcgcccggcacctagaacggcgatacgtagcatggtcgaactcctggattattattggatagggtgtttcagcgcttcagtccggcaggttgaacggcgtgacgatctgcacctgtgacggcgcaatcggcccggccttccatagccggtggtattgcaggatgtgcaggaatacgtggcgggcatcgatctgcaggttgtgatcaatgatcgccgcgactttttcttcgcgcagcagttggcggttttcttcgtcaaggtcgtggccgatgaatacctccaatgaacggtcctgcgcggcaaacgcgtcgacaattgcgcggttgccaccgccgacgctgtacactgccttcagcccggggtgctggtgcaaggcttgggtcactcgttcaaaggtgcgctcatacacgccgtagccgccgctgatatccagtacccgcaggtgctcggcgcggccacgcagccaggcacgaaaacccatctcgcgctcttcttcgccgcggaacaactcgctgccgatcaccaccgccacgtcctgaggatcgctcggcagccagcgcgacatcaggtaggcagcggtctggccagccgtgcgattgtccatgcccacatagccgatgcgctcgctttggggcaggtcggtgaccaaggtcaccaccggaatgccggccgcaatcagctgcttgacggccaggttcaccgccggttcatccgcagccttgagcaccacaccctggctgcccgtgtcgaggcagcgcagcagttggtcgtgcatggcctggggctcgatctcctcgaacaggtgaaaacgtggcgcgatgcgaaacggtgccaggctggacaattggccaacgatcgccgcctgcaccgcggcgctgaagcgctggggcgtgtgcatgatcacgtccacatggaaggtgcgccccacggccaagccatttttttcctgggattccaactcctccaatgcctgctcaatccgccgccgggtctgggcatgcacgctgccgcgctggtgcagcacgcggtccaccgtggccttgctgacgccagcctgagtggcgagttgcttgatggaaaaatgttttgcgcgttcgagcatggatttagcctgaggtgtttttgaggtcttttttgggcgttactgaggtttcgcaatgctagtctcagttttgcctgacgtcgagccaggtcagcaaaacaataaaaatccaggagaaccctcatgccccactccgatcttgcgacctcgttcagcggccaatactttgtcgtaaccggcagcacccagggcctcggcgcggcggtggcccataccctggctcgccgtggtgcggccggattgattatttgcggacgtcgccgtaccgagggcgaagagcaggtgcgccaactggcacagctggattgccaggcattttttgtcgaggccgacctggaaaaggtcgaggactgccgcgcaatcatcgaagcggcgcgcgtccatttcggcactttgcacggcttggtgaactgcgccggcatgtctgaccgtggcaccattctcgacacctcgccggaactgttcgagcgcttgtttgcggtgaatgtgcgggcgccgtttttcttaatgcaagaagcgctgaagctgatgatcagcagcggtgttgagggcgcggtggtcaatatccagagcgttaccggccatggtgggcagtcgttcttgagtgcttatgcggcgtccaagggcgcgctggcgatcctgaccaagaacgtcgcattcagtgccttgcgcaaccgcatccgcgtgaatggcctgaacatcggctggatggacacgccccacgaggatcagatccagcgccagtaccacggcgcccaggacggctggctggccgatgccgaacgcacccaaccgtttgggcgcctgctcaagcccgaagaggtagcgcgcagcgtggcatttctgctgtccactgagtcgggaatgatgactggcgcagtgatcgaccttgaacaaggtgtggtcggctgcaccgacagcagcaccccacaacctcaccaggccctgagccttccaggaggtatgtgatgtcggctttcgtaaccggcgacgcggtgcgcctggccgacttcagccggatctgtgcgcagcgcaccaacgccagcgactacccgctgtgccttgaggtacaaggcaatgtgccgatctatcaggcccacaccttgcgcaacagcgaccgcctggtcgtcatgaacgaactgcatcacctgttccgtgacgggcccggcgtaatggtggtgcgccaagcctatgaagatctggaagtggtggaccgccacagccaggtcttcgacgcgatctttgcccatgaagccgcccagggcgtggccgccgatcactttgccaaggccggcagcaatggcaggatctggaacgcgctacagaaggcggccttacagtcccccgaatcctttgccgagtactacgccaaccctctgctggggttaattgccgaagcctggttggggccgggctttcaagtcacggcgcaagtcaacgtggtgcatccaggtggccaggcgcagcagccgcaccgagactatcacctgggtttccagaccaacgatgtggtcgaacgttttccgctgccgctgcatgcgctgtcccaacatctcacgttgcaaggtgctatcgcacattcggatatgccgctggaaaccggccccacccagctgctgcccttttcccagcagtatgccttggggtacctggcgtggcgtcgcacggagtttatcgactacttccagcaccacgcggtgcaattgccgctgaacaagggcgacttgctgttcttcaacccggcactgttccatgccgccggcaccaaccgcacggccgatcgccagcgcatggccaacctgctgcaaatctcctcggcattcggcaagccgatggaagccatcgaccgcgaccgcatgatgctggcggtgtatccggtgctgctcgccaaccccaacctggattcccgcgccgtggtcgcctgtaccgcagacgggtactccttccccactaacctcgacaccgacccacccttgagtggcctggccccgcaaaccgggcaacaactgatgctgaaagccctcgacgaacgctggccgtgctcggacttcgccgccgccgtggcgcagctgcgggccaaacgccaagcgtgaaccgccctgctttgacaacaacaaaaacaacggagcacaaccatgaagaagcaactccttgcggcactgttagtccttgcgttcagcccttgggcgctggcggacattcgcatcggcgtgagcatcgcccaggtagacgacgtattcctcgcacaaatgcgcgactacatggccgcccacgccagggaactgcccgatgtcaccctgcaattcgaagacgcccagggcgacgtggtgcgtcaactcaaccaggtgcaaaacttcaccgcccaaggcatggacgcgattatcgtcaacgcagtggacacggccgccacccagaagatgacgctcaatgcccagcaggccaagatcccgctggtgtacgtcaaccgccgtccggagttcaaggaggtgccagcgggcgtgggctatgtcggttcggacgagatcaaggccggcgaaatccagatgcgctacctggccgagaaaatgggcggcaagggcaacctggcgatcatgctcgggctgctgtccaacaacgccacccataaccgcacgctgggggtgaagaccgtgctaaaggactacccagacatcaaaatcgtcgaagaacaaagcgccgaatggcagcgcggcaaggcgattgacctgatgaacaactggatcgtatccgggcgcaaaatcgatgccgtggccgcgaatgccgatgaaatggcgattggcgcggccatggctatcagccaggcaggcatgcagccaggcaaggacatcctggtggccggcagcgacggcggcgcagctggattggacgcggtgaaaaaaggccagctgttggtcacggtgtaccaagacaacaagggccaggcagtgggttccatcgacctggcagtgaagatggtcaagcagcagccgtacacggcggagctgacgattccttatcagcagatcaccaaggacaactaccaagcgttccttaatccctgaagaccgcgcactactcatggcaagggagcttgcgcccttgccatacaggcttagttgagtgttcgccgagaaaacccattaaccacgatatagagcaacggccccaccgacacaaacaccgccgtcagcacaaagtacggcaacaccgagcctatcgaccgccctcgcccacgcgcatcccggtacatccacacacacgccagcaccgccatcaggtacaggtcaatcaccacctgagccgtatcgggcctggacatcagttcccatccaaatgccagcagtgattgctcggccgtgagcatggtcgccacggtatagacggtaaatcccagcaaggccgccagggcgatataaggtttttgcatggtctcttccttgaagtgcaacgttaatcaacgcggccaccttagcgataagaggctgccgctcgcaatcctgctgacgtctttcccgagatgtcctgcgcgccgcctacacgaagtatgccgcgctggttttgtgaaatatctgtacgtagactgccgccatacctccacttgaaggcggcgaaaaaaacgtgatgcaagttactgaagtctccattgcccaattgcgcgctgcgcttgaagcaggccagaccacggcagttgaactggtgcaggcgtacctggcgcggatcgatgcctacgatggcccgcagacggccactgcgctgaacgccgtggtggtacgcaaccccgatgcgctcaaagaagcccaggcgtccgatgcgcgccgtgccaaggggcaaaccctggggccgctggatggtatcccctacacggccaaggacagttacctggtcaaggggttgacggctgcatccggcagcccggcgtttgccaagctggtggcccagcgcgatgccttcaccattgagcgtctgcgtgccggtggcgccatctgcctgggcaagaccaatatgccgccgatggccaatggtggtatgcagcgtggcgtgtatggtcgcgccgagagcccctacaacgccgactacctcaccgcgccgtttgcgtcgggctcttccaacggtgccggcaccgccaccgccgccagttttgccgccttcgggctggctgaagaaacctggtccagcggtcgcggcccggcttccaacaatggcctgtgtgcctacacgccttcgcgtggggtgatttcggtgcgcggcaactggccgttgaccccgaccatggacgtggtggtgccctatgcgcgcaccatggccgacctgctggaggtgctcgacgtcgtggtggccgaagacctggacacacgtggcgacctgtggcgcctgcaaccctgggtaccgatccccagcgtcgcctcggtgcgcccagcgtcctacgcggccctcgccgtcagcagcgaaagcctggccggcaagcgctttggcgtgccgcgcatgtacatcaacgccgacccggaggctggcaccagcgaaaaacccggtatcggcggcccgaccgggcaaaagatccacacccgagccacggtgatcgaactgtggcaagccgcacgccaggcactggaagccgccggtgccgaagtgatcgaagtggatttcccgctggtgtccaactgcgaaggcgaccgccccggcgcaccgacggtgtttacccgtggcctggtttccaaggaatttctccacgacgagttgtgggaattgtcggcctgggccttcgatgacttcctgcgcgccaacggcgacccgcacctgaaccgcctggccgatgtggacgggccgaagatcttcccccacgaccccggcaccctgcccaaccgtgaagacgacctggccgccggcatggacgaatacgtgcgcatggcccaacgcggcatcaccccatgggaccagatcagcaccgtacccgatggcctgcgcggcctggagcaaacccggcgcctggacctggaagactggatggataccctggggcttgacgccgtgctgttccccaccgtggccgacgtaggcccggcggatgccgatgtgaacgaagcgtctgccgacattgcctggagcaacggcgtgtgggtggccaacggcaacctcgccatccgccacctgggcgtgcccaccgtcaccgtgccaatgggcgtgatggcagacatcggcatgccagtggggctcaccttcgccgggcgcgcctatgacgattcggcgctgttgcgctttgcctcggcgttcgaagccaccggcagcaaacggatgatcccgccgcgtacgccaccgctggcggctatctagctgggctccccgctcccacactttttgttcatatttcagttcaaacaccgtggtgcgaggaccgaagcacctcgttgcgccgctgccactcctccaccacatcccccaaagtcttgggtgcgccgttacgaatccacgccatgaatggacggttgaacttgaacgccgggccacactgctcaagcataaagcggcgtacgttctgggtgtttttatagctagaggtgacgggtgtagcactggtgatgacgtcgctgtgccagtcaaaatccatgatgtacctcggctgcgcggatggtgatgaacactctagcgcctcctcacctcaagctcctgcaaatttcactttccttcccccttgagaatattgcatggttgtacgacgacatacctcgtcgtatttcccaacaacaataaggaaaaccccccatgcccaacttcaaagtgctgatcggatttctgtgcctgttctgcggctacgtcgccgccgcgcccggcgcagccgagaaggatgtagcccaggcagtcgatcaattgacccaagccatgctgcacctggacctcaagcagcttcatgcactgacgtccgacaagctcacctacggccactccagcggcaaggtgcagaacaaggcgcaattcattgccgacctggaaacccataccagcgcattcaaaaccctggagatgcaaaaccagaccatcaccctcaatggcgataccgccctggtgcgcaaccacttccacgccctggcagtgaacagcggtgtggacacaccaaccgatatcgataacttccaggtctggcaaaaacagcatggcaaatggctgctgattggtcgccaggcttacaagtactgaagatcgctcaccacgccaccaccttgcgcaccttcaccagcgcctcacgcaacgccgccatgggcaccgaacccagggccaggcgcagcgcgtggggcacctgggccgagaccgcgaacggttcggcggttgaaaccgagatgcctgcgcgctgcaaggtcatggcgacctgatcggcgcgggcatcttccgccaacggcagccacagaaagtaggaggacggatggctgatggtcttcacgccggtcagcacctgtgccgccaatgcctggcgggcctgggcatccgcgcgcttttgcgcctccagttgcgccactgtaccgtcttcgagccagcccaccgcaatcgcactcatcacccctggcacgttccaggtggtggccatgatcgtgcgttccaggccgtttacccaagccataggcgcagcgataaagcccacacgcaacccggtggcgacactcttggacagcccgccgatatacaccgtgcgctccggtgcaagagtcgccaaaggtggcggtgcttcttcggcgagaaacgcataggcgccatcctcgatgatcatcaggttgtgctgccgggcgattgccaccaagcgctcgcgctgcgccaggctcatcacccagcccagcgggttgtgcagggtcggcatgctgtacaccgctcgcaccgggcgctggcgacacaggctgtgcaggtggtccaggtccgggccgctggcggtgactgggatggcgaccagttccaggtgcagggtttcggccagtaccttgaaccccgaataggtcaatgcatccaccgcgaccacatccccaggcttgagcaaggtcatcatgctcaccgccaggccatgctgggcgccgctgacgacaagcacctgctcggcttgcaccgccaaccctcggttcaacaagtgccgggccacggcggcgcgctcgtgcacacgcccggcatggggctggtagcgcagcagcgcctccagatcgccagacagggcgagctggcgcaacgccgtgcgcaacagctcggcctggcccggcaaggacgggtagttgaaattcagatcgagcacacccgccgtaaccgtcatctgcccgctgccctgccctggcggcaacgcgatttcacgcacgaaagtgccgcgcccggtttcgccgctgaccagtcccatggcttccaactcgctgtacacccggctggcggtgaccagtgccaggccatgctcggcggccaattgccgatgggtaggcaagcgcgtgccgggctgcaattggccgctgcggatggcctcggcgaaggtatcgaccagcgtcttgtagcgagcacggggcatagggttgtatccatgacaattttttgattgtcttaatcttcaatcctaggatgcccagcacgcaactgccattttcggacaggtcccccatggaacgcacttctcctctcggcactctggacagcagcacccagggttggatcaacggttttatcggcgtggtgattttcagcggctcgctgccagccacgcgcctggcggtgatggaattcgacccagtgttcctgaccatgatccgcgccaccctcgcggcgctactggggttgtgcctattgggggtattcaagcaaaaacgccccacacgccagcaatgggccccgctggttatcgtcgcgcttggcgtggtgatcggctttccactgctgacggccctggccctgcagtacgtaacctcggcccattccatcgtctttatcggcctgctgccactggccacggcagtgttcggcgtgctgcgcggcggtgagcggccgagactggtgttctggttgttttcgatcctgggcagcctgttggtgatgggttatgccgttgcccaaggcttgagcgccgcacccgcgggcgatgtgctgatgctgttggcggtgctggtgtgcggcctggggtatgccgaaggcgccaagctgtcgcgcagcctgggcggctggcaggtgatctgctgggcgctggtggtgtcgctgccggtggtcgcgcccttgagcctggtgctggcgccgtccaccctcagcggtatcagtttgccggcgtggttgagcctgggctatgtggcgttgttcagcatgttgatcggttttgtgttttggtaccgcggcctggcccagggcgggattgccgcggtcggccagttgcagttattgcaaccattcttcggcctggcgctggcagccggcttgctgcatgaacaagtcagcctgggcatggtgctggtgacggtggcggtgatcggctgcgtggccggggcgaagaagtttgctcgctgacccctggcctgctaaatagaagcgtcgccaaacaacaacaaggactctgcatgcacagcgcttctctccaggacaccacggcgccggacggcatctgttacggctgcggcagcagcaacccccatggcctgcacatcaagagccgctgggatgacgatggcgtgcatgtcattgccgagcaccaacccgaggccaaatacagcggctggccggatctggtctacggtgggctgatcgccatgctggtggactgccattccaactggaccgccatggcctaccactaccgcgccgaacagcgtgaacccggcagcctgccgcgcatcgactgcgtcaccggtaatctggggatcaaattcatcaaacccacgcccatgggggtgcccctggtcctgcgggctcgggtcgaaggcgaaatcggccgcaaaagccgtgtggtctgcgaagtgtatgcaggcagcgtgctcaccgccgtcggcgactcggtgttcgtgcgcgtcgacaccgggcaactggccgctgccgcccatggccgcgaggtttgatcctggtctacagtgacggcaaccgctaatcgaggactgcaccgatgactcgtctgaccgcgaaagactttgctcccgaactgctggaactctacgacggctacgcccatggcaagatcaaccgccgcgaatttctcgaccgcgctgcactgttcaccctcggtggcctcaccgcttcggccttgctcacggccctgagccccaactacgccttggccgaacaggtgaagttcaccgacccggacatcgtcgccgactacatcacctacccctcgcccaaaggcaacggcaccgtgcgcggctacctggtgcgcccagccaaggccgcaggcaagctgcccgccgtggtggtggtgcatgaaaaccggggcctgaacccctatatcgaagacgttgcccgacgcctggccaaggccggctttatcgccctggccccggacggcctgacctcggtgggcggctaccctggcaatgatgaaaaaggcgtggcactgcaacagacggtcgacccgaccaaactgatgaacgacttcttcgccgccatcgaatggctgatgcaccacgacagcagcacgggcaaggtcggcatcaccgggttctgttatggcggcggcgtgaccaatgcagcggcggtggcctacccggaactgggcgcggcagtgtcgttctacgggcgccaacccgacgccaaagacgtgccgcgcatcaaggcgccgatcatgttgcatttcggtgagctggatacccgcatcaatgaaggctggccggcgtatgaacaggcattgcaggcggcgggtaccacgtatgaggcatttatctacaagggcgccaaccacggttttcataatgattcgacgccgcgttatgacgaggcagcggcgaaccttgcctgggaacgcactttagggtggttcggcaaatacctcgcctagccaagcgctaactgtgggagcgggcttgcccgcgaaggcggtgtatcagtcgctgcacctgttactgcacgaccgttttcgcaggcaagccagctcccacattgggtcttcgttgctttggcatggcgttcgcttaactgattggaaaatccctcgcacatcaggcaacactcgtctgcagccaccctttgaacgccaacatcgcgggtgtttcagcccgcgactgcaagcgcgtcagccaatagctgccggtggtgatccccacctcgaacggctggcggatcacatcgctctccaattgccgcgagaacatcagggctggcgccagtgctaccccagccccttgcagcgcggcctccatcatcgccagcgaggagtcgaacaccacgctgcgcggcacccgggtatcgccgggcaaaccggcggcctggaaccacaggttccactcatcggcacggtaggaacgcagcaaggtgtgcttcaacacgtcagccgggctgcgcagttgttcggcaagctgcggcacacacaacaccgtcaacggtacctcaagcaaagggcaggcatcggtgccgtgccaggcgccggcgccaaagcggatggcataatccaggccctcggcggcgacatccacgcggttgttgtgggtggacaagcgcaagtcgatcaacgggtagcggctatgaaaatccgccaggcgcggcaacaaccagcccaccgcaaaggtaccgaccgcccccacggtcaatacttcacggtaatgcccgccttcaaactgatccaaggtcagggcaatacggtcgaaggcgtcacgcagcacgggcagcagggattcgccttcgctggtgagcatcaagccccgtggcaggcgcttgaacagcgtgacgttgagttgcgcttcgaggcttttgacctgatgactgaccgccgcttgggtcacgcataactcgatggccgcacgggtaaagctcaaatgccgcgccgacgcttcgaaggcgcgcaaggcattgagcggcagatgggaacgcaacatgacttggcccaaatttttctaatggctggtgcgagatatcatcgtttgcccgctcccggaaatccacctacatttgccacgcctgcgcaggctccgatcgtcactgccttacttacatggaagcgaagcatgaaacacaccctgaaaaaatatgcgatctcagccttgttgcttggggccggcagctgcatggccgccaccgatatgcgccaggtcgtggacagccacgtcacccctctgatgaaacagcaaggcatcgccggcctgacggtcgcggtcgtccaacacggcagggtgcaatactttaattacggcgtcgccgccaaggacactcaagcacctgtcaccgaaaacaccctgttcgaaatcggctcagtgagcaaaaccttcaacgccacccttggtgggtatgcccaggctatcggcaagctcaagctgtcggacatgaccagccaacacctgcccgtgctggctggcagcgcgttcgatcgcatcagcctgctgcaactggcgacctatacccccggcggcctgacgctgcagtttccggacgccgccgacagcgccaccaccatgatggaatatttccagcattggaaacccacttatgcgccgggggaacagcgcctgtattccaaccccagtattggcctgttcggttacgcgacagcaaaaagcctgggcctgccgttcaccgtcgccatggaaaaaaccctgctgcccaagctgggcttgaccaacacctatacccgcgtgcccgccgacaaggccggcctctacgcccagggctatgacagccagcagaaaccagtacgcgtcaaccccggcgccctggacttcgaagcctacggtatcaagagcagcagccaggacctggcccgctacgtgatcgccaacatgcacccgcaaaccctggaacaaccggtgcagcaggccattgccaccactcacgccggctactacaccgtcaacggcatgacccagggcctgggctgggaacgctacccctaccccatcgccctgcaagcgttgcttgacggcaactccacaccgatggcgatggagccgcacaaggttaactggctcaaacctgcccaggcgcagcctgccaacgtgctctacaacaaaaccggctccaccggcggctttggcgcctatgtggcgtttgtgccaagcaaggacatgggtgtggtgatcctcgccaacaagaactacccgaatgccgagcgggtgaaagtggcgtatgcgatcttgagtgcgatggataactgaagccggcaatacccccgatgggcgggggctgaccttagcgttggcggtgcacgtttgaagatcgccggcctctaggtacaatcaccgccctctcccactcccccaaggatccgccatgtccgggcttgaactgttcgccgccgccctgggggtgatcgccgtctggctgacggtcaaacaaaacccatggtgctggcccatcggcttggtgatggtgctgctctacacctgggtattctttgaggtcaagctctactccgacatgctcctgcaagtggtctatgcggccttgcaggtgtatggctggtggcagtggacccgcgccggcgaggtcaagcagggccgccaagtcacgagcctgggcgtgccggcgatcatggccagcctggctgtgggtgccgtcggcagtctgctgctgggcgccgccatggcccactggaccgacgccgcccagccttggctcgacgccgcgctcaccggtttcagcctggtggcgcaaatgtggatggcgcaaaaacgtgtgcagtgctgggccttgtggatcgtggtggatgtgatcttcgtcggcctgttcctttacaaaggcctctacctcaccgccgcgctctacgcactgtttaccgtgattgccgtgcaaggctggcgcgagtggcgcgccgacccggcgttgcgcgcatgaaggtggtggtattagcaggccccgaatccagcggcaagagctggctggcggcgcagttgcacgcgcacttcggcgggttgatggtaggggaatatgtgcgctacttcatcgatcagcatcagcgcgacaccaccctggcggatatcccggccattgcccaaggccagttggcctgggaggatgccgcccgcgccaaacgccccgcgttgctgatcctcgacacccacctgctcaccaacaggctctggagccagacccttttcggcgactaccccggctggctggatgacgaacttctggcgcggcattacgacctgcacctgctgctctcccccgaagacgtggaatggagtgccgacggccagcgctgccagccggaactggcggataggcaggcgtttttccaggccagtctggaatggatgcagcagcaccaacagccactggtggtgattcgcgggggctgggaacaacggcgccaggcggcgtttgccgcggtaacgcagttgctgtaggagcgagcttgctcgcgaaaaacgtcaacgataacgcgtgttttctggataaacgcggcgcctgtgagttttcgcgagcaagctcgctcctacaggatgacattggggcaagcccctttactcggcatacgcccacgtcatccgaaacgacgccccgccccattccgaatccagcacctcaacttgcccgccatgccactggctgacacgcttgaccagcgccaggcccaggccaaacccgcctgtgcggcggtcgcggctggcgtcgaggcgcaggaagggttcgaatatcttggtgcgcccctccagcggcacccccggcccatcgtcgttgacccgcacttcgtaaccgctgccaaacttgaacagcgacacttccacacggtggtcggcataacgaatggcgttgcgcagcaggttgatcacggcccgcgccataaagcgtggctcgatctggataacgtccacctcgcaggtgcgcaacgacagctgcaccccttgcgcctcggcctccagggccacggcgcctataacactgtcgagccaactgtgggcctcgatatgctcacgggtgacctgggtggcgcccggctcaaggctggcataggtcaacagctcggagaccatttcttccagctcaccgaggtcggcgtacatgtcgttgatcagcgctcggctttgccgtgggtcgctttgttgcctgagttgatcaagctcgaatgacaaccttgcaatcggcgtgcgcaattcgtgggagaccgcattggtgagttcgcgctggttggcgatcaggccctctatgcgctcggccatctgattgaagtgcccggccagggaacgcacggtggaacggctcggcagcaggatgcgcgagcccaggtcgttgtcaccgaaacgttgcgccgcgaggcgaatgtgctccaggtcgcgccagtgtgggcgcacccagaaatacagaacaatggccaggctcacgcccaggaagccgtaggcccacaggtacaaccacttgggctcttccggcaatttgatttcgagcaattgggggccgtcgtcgataggcgcgagaaacttcatgaagtcttcgcgcaccaccacctggccagccgcgaggagtttgtgttcgcgctcgctcaaatcctggttatcacgctgcaccagtttgagccgcaagccgtaatgcggttgcagttcgtccaggcgtgcctggcgcgcctctgccggcacggggcgcagctgttccaccaaggcccacgccggtccgcgcagggcttcacggttataggtttcgttggactcgggcatgtaggtgtccaggccgaagttcaccagccagatcgacccggccaggccgagcgcaagtatcacgtaaaggcgcagatacaagcgcagcatctacacctcccacgcgaacggattgaacaggtagcccttgccccagatggtcttgatgcacaccggctcgcgggggttgtcattgagcttgccgcgcagtttgctgatgtacacgtctacgctgcggttcagcccatcaaaggcaatgccgcgcatgcggttgaggatatcgtcacgggacagaaccttgcccgagctgctggccagcaaccacagcaactcgaactccatggtggtgaggtcaatggtctcgccgcccaggcgcaccacccggcaactgcgatcaatcgacaagcggccaaactccagagcgccgcgcatcgtgggctcgggcacctggcggcgctgcaacgcacgtaggcgcgccaacaataccggcggtttgatcggcttgatcacgtaatcgtcagcaccggactcaagaccaaggatatggtccaggtcatcttccttggcggtgaggatcacgatgggcgtgtccgacacgttgcgaatctcgcggcagacatgcagcccgctctgacccggcagcatcagatcgagcacgacgatcttcggcttgaaatccacgaacgccgccaaggcttcatcaccccggtacaccacccgtacctcgaaaccatgctgcgacagaaaatgcgagaccagccctgccagcttttcatcgtcctcaacgagcaggaccttgcccagacccaggttttccataagttctcagtgtggatgcgcggattgaaaaaggaccattataggtggcaagctggccgacagaagccgctggccagtacccagcgaagaagcttcatgcttttaagagtttttaacaaatagcctgcactttttaacgccattgacagggagttccatgcgcaaggattacctggcgttcttcatttcgctgttcctttcacggctggccgaccagattttgctgtttatcgtgcccttgatcgtgttccagaccactcaaagcgtgtcgtgggcgggtttggcgttttttgtcgagtcactgccgcgctacctggcgtttccggtatgcggcgcgctgtgcgacaggttttcaccggtgcgtatcctgcatatcagccaggtgtatcgggccttggcgtgtgtggtggcgatggcgtgctatgggctgttcgacggcatccattggctggtgatgctgtccgcgctttgcggcgtgttgaccacccagggcatcatggcgcgggaagtggtgatgccgcatatcttcgggcagtacacctatgccaagaccttgtcctattcgcagatcgccgaccagggcggactggtgctcgggccgttggcggcggcgctgatgctggaagtctgggcgtggccatgggtagtgctgggcgtcgccgcgctgtttgtgctggcagacctggcgatgctgatctggcagcgcaacaccacggtggacctgcacatccatgaacaacagccgggtaactggctgcaacccctgcgcaccgcttttggccacatcctcaaccgggtggagttgaaacgcatcatcgtcctggcggtcggtgtgaacctgatggtcggcgtgacgctggctacctcggctgccatggtcactggccactacgcagcgggcaaagacgcctatgccctgctgcaagccgccggggcgctggtgacaatcgcgattctgttctacctggcgcattcatcactgaagctgaaggtactgggcgggttgtcgtactcgatgatcaccgtcggcgcgctgatcacagcgctcagccccggcgtgtgggcctacacggtggggttcctgctgctgaccggcttcgacaagatgttcaacgtgtacctgcgcagcacccgccaacgggtgattccggtgcaggacttcggcaagaccgttggcgtgatgaccttgctcaacaacctggcccagcccttggcgggcttgatgattgccgtgttggcagcgcctttgggcacgccaacggtgatcctgctgctggcggggatcaccgccttgatcggtgtggccgtggcctcaggctggcacgccactgtgaaagcggaactcgacgtcgggtgattcgatcaggtcctgctcggtggcccgcacccgctcgatcacctgggcgatgtccttggcgtcgccgtactggtaagccagcttcaagtaaccctggaagtgccgcgcctcgcttttgagcaagccgaaatagaacttgccgagttcttcgtccaaatgcggcaccagcgcttcgaaacgctcgcaactgcgcgcttcgataaaggcgcccaccaccagggtgtctaccagcttgaccggctcatggctgcgcaccaccttgcgcaaacccgaggcataacgcccggcgtgcagttgacgcagctcgaccttgcgctttttcatcaggcgcatgacctgctcgtggtgcaccaactcttcgcgggccaggcgcgacatcatgttgatcaggtcaacgtggccgtagtacttggccatcaggctcaaggcagtgctggcggctttgaattcgcagttcttgtggtcgatcagcagggtttcctggtcggccaacgcggcctggacccaggcatcaggggtgcggcagccgaggaattcatggatttcgggcaggttcatcgggctcacgggcaaaggatcacaaaagggcgccgattataccgaccccgccgcagaccaccagccaccggccttgatgtgtatcaacatgacggttgccgaccagcaactatagttattcaacgcccgtccttttcaggagaacccgaccatgcaagccatccgcagcatcctggtggtcatcgagcccgagcactccgaaagcctggcactcaagcgtgccaagctgattgccggggtgaccgacgcgcacctgcacttgctggtctgtgacaagaaacacgagcattcggcgctgttgagcctgctcaagcaaggcttgacggaagacggctacagcgtcaccaccgagcaagcatggaacgacagcctgcatgaaaccatcatcgatgtgcagcaagccgaaggctgcggcctggtgatcaagcagcacttccccgacagcccgctgaaaaaagccctgctgaccccggcggactggaagttgctgcgctattgcccaacgcccgtgttgctggtcaagaccgctactccctgggcgggcggcgtgatcctggcggccatcgacgtgggcaacacagacggcgaacaccgctcgctgcaccattggatcatcgaccatggctttgatatcgccagcctggccaaagccaaattgcatgtcatcagtgcccacccgtcgcccatgctgtcggcggccgacccgacctttcagctcaaggaaaccatcgaggcgcgctatcgcgagcagtgcaaggcattccaggccgagttcgacgtggacgacagtcacctgcatatcaaggaaggcccggccgatgtgctgattccacacatggcccatcagttacgggcggcggtgaccatcatcggcacggtggcccgcacggggatttccggcgcgttgatcggcaataccgcagaagtggtgctggatgcggtacaaagcgatgtgctggtgctcaaaccgcagacgctcatggaccatctggaagagctggcgaccaagccctgacaccgaccttcaggcaatgtagatcaaattttgctcctgatacaccgccatcgcaggcaagccagctcccacattgacctcgccagtcagttaacccagcgcatctttcaagaaccccggcgcgatatagcgctggtaatgcgcctcggacaagataaagaactcgcgatcaatggcatcgcgcagttcaggcagcgcccagtcgcgaaactccggcaacagcaccatgccataggcctccaggttattgatcacccgggccccacgggcgatcaactggtaggcccagcaatactcggactggtgtggcacaaagcgaatcttgcgttgctccaactgcccgcgcagggtcttggggtcgaaaacctccactttgccggccatgacctgcaccaacagctgctcaagcctgagccagaccgcgcgcttttcttcttcgttatagccgttccactggatcacttcatggtggaagcgcttgcatccacggcacacgagatcgccgtagaccgtggaacacaggccgacgcagggagtcttgatggtttggttgggcatgggcaatgacacgcaaatccgcgaaacagtgcgccatgttagccctttgtctaaggttgatcacccagcaaacttgagcaggcaacttacctttagattttttttgccgtagaatcacccggccttgtaaggcgccaataatccgctggaagctgttttcaaagcgtcacgagcacagtcgttccttcagaacggtgttggcgcaggttcgacccggtaggtcagagcccgcgccaaccctcatcagctccgttctgcaggcgtaaaactttgaaagcagcttctgtaaagaaatggcggcagcgctggctttgcggcccaaaaagcccccgagcgcatgcgtgccgttcatttctggatgagcgtcccgtgggaccactgatgagggtaataactgtgcttgaagcctaccgcaaacatatcgaagagcgtgcagcactgggtatcgttccccagccgcttaacgccgaacaaaccgcaggcctggtcgagctgctgaaaaatcctccggctggcgaagaagaattcctcgttgacctgatcaccaaccgcattccaccaggcgttgacgaagccgcttacgtcaaggccggtttcctgtctgccctggccaagggcgaagccacttcccccctgatcgacaaaaaacgcgctgttgaactgctcggcaccatgcagggcggctacaacatcgtgacgttggtcgagctgctggacgacgccgaactggcacccgtcgcggccgcccaactcaagcacaccctgctgatgttcgatgcgttccacgacgtcgccgaaaaagcccgtaacggcaacgagcacgccaaaggcgtgatccagtcctgggctgacggcgagtggttccgcaaccgccctaccctggccgacaagatcagcctgcgcgtcttcaaggtcaccggcgaaaccaacaccgacgacctgtcgcctgcgcctgatgcctggtcccgccctgacatcccgctgcacgccctggccatgctgaaaatggctcgcgaaggcatcgtgccggacgagcaaggcaagaccggcccgatgaagcagatcgaagagatgcgcggccaaggcttcccgattgcctacgtgggcgacgtggtcggtaccggttcgtcgcgtaaatcggcgaccaactcggtgctgtggttcttcggcgacgacgtgccgtatgtgccgaacaagcgtgccggcggcttctgcttcggcagcaagatcgctccaatcttctacaacaccatggaagatgctggcgcactgccaatcgaattcgacgtcaccaacatgaacatgggcgacgtgatcgacctgtacccgcatgctggcaaagtctgcaaacacggcaccgacgaagtcctgaccacgttcgaaatgaagactccggtgctgttggacgaagtccgcgccggcggccgtatcccgctgatcatcggccgtggcctgaccgacaaggcccgcgctgagctgggcctgggccctaccgacctgttcaagctgcctgaagcgcctgtcgacaccggcaagggcttcaccctggcgcagaaaatggtcggcaaggcctgtggcctgccagaaggcaaaggcgttcgtccaggcacttactgcgagccgaagatgaccaccgtggggtcccaggacaccaccggcccaatgacccgtgacgaactcaaggacctggcgtgcctgggcttctcgaccgatctggtgatgcagtccttctgccacaccgcggcttacccgaagccgatcgacgtgaccacccaccacaccctgcctgacttcatcatgacccgtggcggtgtatcgctgcgtccgggcgacggcatcatccacagctggctgaaccgtatgctgctgccggacaccgtcggtaccggtggcgactcccacacccgtttcccgatgggcatctcgttcccggccggttctggcctggtcgcgtttgccgccgccaccggcgtcatgccgctggacatgccggaatcgattctggtgcgcttcaaaggcaagatgaaacctggcatcaccctgcgtgacctggtgcatgccattccttactacgcgatccaggctggcctgctgaccgtagagaagaaaggcaagaagaacgccttctctggccgcatcctggaaatcgaaggcctgaacgacctgacgctggaacaggctttcgagctgtccgacgcctcggctgaacgttcggctgccggttgcaccatcaagctgtccaaagagtccgtcaccgagtacctgaactccaacatcaccctgctacgctggatgatcggcgaaggctacggcgatgcacgcaccctggaacgtcgcgctcaagcgatggaagcctgggtcgccaacccggagctgatggaagccgatgccgacgccgaatacgacgaaatcatcgaaatcgacctgtcggaaatcaacgagccgatcctctgcgcgccaaacgacccggacgacgcccgtctgctgtccagcgtcgctggcgagaagatcgacgaagtgttcatcggttcgtgcatgaccaacatcggtcacttccgcgctgccggtaaactgctggagcaggtcaagggccagttgccaacccgtctgtggctgtcgccgccgaccaagatggacgcgcaccaactgaccgaagaaggctactacggcatctacggcaaggctggcgcacgcatggaaatgccaggctgctcgctgtgcatgggtaaccaggcacgcgttgagccaaactccaccgtggtgtcgacctcgacccgtaacttcccgaaccgcctgggtgatggtgccaacgtctacctggcgtcggcagagctggcggccgtggcctctaccctgggtcgcctgccgaccgtcgaagagtacatgggctacgcggcgaaactggacaccatggccagtgacgtctaccgttacctgaacttcgaccagatcgctgagttccgtaagatcgcagcgagcgccaacatcccggtgattcaagcttaacggtgtgttgacgtaaaaaacgccgcgtatcgcaaggtacgcggcgtttttttatgcctggannnnnnnnnnnnnnnnnnnnnnnnnnnnnnnnnnnnnnnnagatcaagagcaagatcaagagcggctcgcttcgcatcgtggttaccgtctgctgcaccccacaaagttgtgtagatacctatgctggacagtcagatagaccgcatcagggctcaggcaagcagcgaatacaccaacgccgtaatggcaaccaaaccaaccgcagtcacaaacacattcgacgcctgcccacggtacttggccatggccggcaccttgcggatggcgtacatcggcatcaggaacagaatcgacgcaatcaccggcccacccagggtctcgatcatgccgaggatgctcgggttaagcgtggcgacgatccagcacaccaccagcatgaaggctgctgtcatgcggtccagggtcttgggtgccgggcggcggccagtcttgaccaccagacccttgaggccctcgctggcgccgatgtagtggcccaggaacgacttggcaatcgccacgaacgcaatcaacggtgcggcaaaggcaatcgtcgggttatcgaagtggttggccaggtacgacaggatcgacaggttctgcgctttcgcttccgccaactgtgcgggcgacagggtcagcacgcaactgaacacaaagaacagcaccatcgccaccatcagcaggtgcgcgcgggagaggatctgcgaactgcgctcctcggcgtgtgcgccgtactggcgcttctggtccaccgcgaaggccgagatgatcggcgagtggttgaacgagaacaccatcaccggaatcgccagccatagcgtattgagcagcgccgacggtgccggcacctcactggcggtgctgagaatgccaccattccagtgcggcaccaggtacacggccaggaacagcaaggccacaataaacgggtacaccatcaagctcatggccttgacgatcacttgctcaccgcaacgcaccacggccagcaaacccaggatcaacacaaacgccaggatggcccggggcggcggcaggatatgcagctggtgctccatgaagctgctgacggtattggtcagcgccacgctgtagatcagcaggatcgggaagatcgcaaagaagtacagcaaggtgatcagcgcaccggccttgataccgaaatgctcttcaaccacgtcggtgatgtcggaaccttcacggccggacagtacgaaacgggtcagcccacggtgggcaaagaacgtcatcgggaaggccagcaacgccaggatcaccagcggccagaagccccccaggcccgcgttgataggcaagaacaaagtaccggcgccaatggcggtaccgaatagcccgagcatccaggtagtgtcctggcggctccagcttgtgagcgttgcaggtgtcgttgcatagcgttcgtcgacgctattggcctgatcattcatccggtcggatctccgcattcacacggccagcacgagtcagaaaaacctgacaggcagcgccctggccgaaacaagggccggattgtccgggattctcttggagaagcaaagacttagctgagcaatggttaggcggtgcatctgttcaagggcggctattcgtaaaggatctggatgaccgaggtgccgtacgaacagccctgctttttcctctaacacgtcaaacttacaagaagattccgacaataagttcagaacttgcccgcttaaaagtcatattcttaaccctacaacacctcaactgtttcagaaccatacacaggtattgagcctgcacaaattcacacactaatatcttcgcgcaccgatcaaaaatacgacaacaccactgaatccacgtttaaggagtttgatgatgcgaaaactcaccgctacttttgccggcttattttttgcggggttattaggcgcccagtcaagtcacgcgacacctgttgagcccgaggtggacattcgtgccttggcctcttcgcctcaatggctgacgactaaggtttatatagagggcgaaccacaaaacgacgtcaaagccaagtaccccggcgtggttggcatttccatgtgggacccacaacgcaatcgttatgagttcttctataccgatacggggcgctcgaaacaccctgacggtgggggcggctattttatggtcactggcgacaaacagacccacatcctggtacccgacctgggccctcaccgcaccatcgtcagaaggttggaaaaactggataacactgaatttacttattctcgcgaagtcccgcgcgacatggtagcaactaacccgcccgttcgaatctacgtggtgcacgcgccttacagcgggccgataaagactcagatgtcaaactaatcaattcacttatcgccaaccataaaaatcaataacaaacgaggcacttcaatatgaatatacacacgcacctgaagtcaatgttaatacccgcactgttggcggccacgctgttacccactgcatccgaggtacgtgctaatgcggccccgacagcaaaaaatgtcgccgccacctccgataacgcagtgatgttgaccgtctttcttaaacacgatcaatcccgaccgctgggtgaattaaaagcccaactggccaagcaggaatttcacaaggtattcccgcccgcaggtgtagaagtcgtcagctggaatatcaccatgggcatcgggcaagtcatcgtgttgcgcctgccggcgtcgcgtctggcggcggtcaacctcgccatcgagaacacggcgtggggtgcatacaagacagagttcttccccacatacgatttcatgccgatagcccagagagagcaagcccaggcacggcaggcggggacggctgaataatgggtgccctcagctaagccaccgagcttcccacgcttggattgcgcagctcgccgcgtatggcgttctgcgcaatagccagtgtttgactcatccagcattcttgcgggaggtcagcgcaataacgggtaggttcggtgcatactcatgctctcaaatccttcaggaagagccttgcgatgcccaccactgttctggtcctggttgaaaccatcaacgaatacctgcaaatcatcgaaagcagtgactttcatgtgatcctggcgccgacgcccgctgaacgcgcgcaggcgatcaaggcccatggtgggcagatccaggctgtgctgacccgtggcccgctggggctttacgccgaggaaatcgccgcactgcccctgctggagatcatttgcgtgatcggtgccggctacgagcatgtagacctgcaggcggcgagcaaccgtgggattgtggtcaccaacggcgctggcgtaaacgccccttcagtggctgatcacgccatggcgttgttgctatcactggtgcgtggcattccccagacagatgcggcggtacggcgcggcgaatggccgaaggtgatgcgcccttccatcagcggtaaacacctggggattgtcgggctgggcgcggtgggcatggagattgcgcggcgcgccgccctggggttcggcatggaggtgagttatcacaaccgccaaccccgcgatgacgtggattacacctactgtgcgacggccgtggagctggcgcgcacctcggacttcctggtgctggccacgcccggcggtgccagcactcgccacctgatcgaccgccacgctctggacgccctggggccgcacggttttctgatcaatattggccgcggcagcgtggtggtgaccgccgacctggtcgccgcgctggaacagcgacgcatcggcggcgccgcgctggacgtatttgacgatgaacccgcagtgcccgatgccctcaagcgcctgagcaataccgtgctgacgtcccacgtggccgggctgtccccggaagcggtccatgacacggtgcagcgcgtcgctgacaacctggtggaatactttgccggccgccccgtgcttacaccggtagccttgccagcgccggcaaaatgaccgatcaggcacgctgatcacgcttcaacacgctaacctattaagccgccccgaccttgtcgctgggcgggtgtgcgcattagattaggaaatagtccaaggcctttagaataagcagaagggataagcatggcgctgaacgaccaatcgacccagattcgcccaggcgaagaacttgatgccagcctgatcgatccctacctcaaggcccatatcccgggcttggatggcacgcccaccatcagccagtttccgggcggtgcgtcgaacctgacctacctgctggaataccccggccaggaatttgtgctgcgtcgcccaccgtttggccacaaggccaagtctgcccacgacatgggccgcgaataccgcattctcaaccagcttaaagatggcttcccgtactgccccaaagcctatgtgcactgcaccgatgaatcggtgattggtgccgagttctatgtgatggagcgcgtcaacggcatcatcctgcggtccgacctgccggctgaactgggcctggacgccacccgcaccgaagccttgtgcaaaagctttatcgacaaattcgtcgaactgcaccaggtcgactacaccgcctgcggcctggccgacctgggcaagcccgaaggctacgtggcgcggcagattcgcggctggagcgagcgctatgaaaaagccctgacgcccgatgcaccaaagtgggaggcggtacgcgcctggctcaacgacaagatgccagccgatcaccccacctccagcatcgtgcacaacgattaccgcttcgacaacgtgatcctcgacccgcacaacccgatgcagatcatcggcgtgctggactgggaactcaccaccctgggcgacccgctgatggacctgggcaacaccctcgcctactggatcgaggccgcggacccggccccagtgcaactgatgcgccgccagccgagcaacgcccccggcatgctcacccgccgccagtttgtcgactactacgccgagcgctccggcatccagatcgacaatttcgatttctattacacctacggcctgttccgcctggccgggattgtgcagcagatttactaccgcttcttccatggccagacccaggacaaacgcttcgcgcagttcatccacatgaacaaactgctggagcagatgagcctgaatgtcatcggcaaatcagcgctctgagtgcaactacaaggaaccctcatgtccaagaccaacctgttcgacctcgacggcaagattgcgtttgtttccggcgccagccgtggcatcggtgaggccatcgccaagttactggcccagcaaggtgcccatgtgattgtctccagccgtaagctggagggctgccagcacgtggctgatgcgatcatcgccgacggcggcaaagccacggccattgcctgccatattggtgaaatggagcagatcacccaggtgttcgccggcatccgcgaacagttcggccgcctggatatcctggtcaacaacgccgccaccaacccgcagttctgcaacgtactggacaccgacctgggtgcattccagaagaccgttgatgtgaatatccgtggctacttcttcatgtcggtggaagccggcaagctgatgcgcgagaacggcggcggcagcatcatcaacgtggcctcgatcaacggcatctcgccgggcgtgttccagggcatctactcggtgaccaaggccgccgtgatcaacatgaccaaagtatttgccaaggaatgtgccgcctttggcatccgttgcaatgccctgctgccgggcctgaccgataccaagttcgcctcggcgctggtcaagaacgattcgatcctgaaaatggccttggcgcaaatcccgctcaagcgcgtcgccgcccccagcgaaatggccggtgcggtgctgtacctggccagtgacgcgtcaagctacaccaccggcgtttcgctgaatgtggacggtggtttcttgtcctgaagccacaggcgccgccggtggcagacgggctggcccgtttgccatcaggcacgcacagcgctcatatcgatcttgaacaacaccagcttgccgtctggcaaggttgcaccaatcactttgaacagccgttgacgcctcagcgcctcctcgaccacctgtccggcgcctggatcatttgcatccagcctgcttaaaaccctcgcaacccaaccatcttccatctggtaatcaggattgaccttggccatgctggtgctgccgcttttggcatgcttgacctcaagcacataaacatcatccgctggccctttgaacaccagatcaaaaccattctgaccaccgccataagttccaccaggaatgattcgatagccatcgttttcaagcagcgcttggtacattttttcgttggcctgcccccgcaatatattttcatcggtggtattcagggccttccattgatcaagcagctgttgctcatctggggtcctctgccgttggggatagtaaagctggtcgttctggagaacggcgcccacattgatccctccctctcgtcgtggggcaacggtggccatgccctgaaagggatcgaactgcacgatgcccaggggtaatgctgtgcgctcggccctggcgcgcatcccgagcagcagacggtcatagggataaccatggcgccagatgtgcgcatcgatcaagcgatctcgatactgcaccggcgcgttgcgaatatgggcgttgtcgaatgcaatcatctgccgcgcatactggcgcatgtagcagtacgtctgcttgtccatggtcgacatcaagccctggctcatgtcactggtaacagcgctgtaacccaggcgcttgcgcgcagcgctgatgatgtcgccaatactgtccaggcgcatttcgggtacccacgacgcccggctgccaccgggatccagaaaaataccgggcaggccgctttgtgcggcagcgactagttgatacttatttctggcgctatcgacctggatgcgagccagtacattgcctatatacagataggtggcagccgggtcgccgtggatctgaaccatgccgtcttcggcaatggcgccactcaccacccacttgccacggtcattaaaccggtggagtttgctcatgcccacccgatagtagtccaacgaaaattgcgtatcgccgtagtaggtctgcccgccaatgagatagttcttttttcccgggatgacagccccttgcgttgcgcccgcaccactggcgtcatagctgtgcaaatcccactgtgggtacaggcgcacgcttgcaggcgtgggactgggcatcgacatggcgcgggaatgtgttgcaggcgtcgaacttgtccaggtgcaagctccagccatccgctgcacaacagcagagctggccgccagttgataaggcaaacgtgggtgataacccccacttgccgggtcgtagaccacttgcactgtttctccggtggtcaggtcgacataactgcgaccacccgcatgacgaacgccctcggcatccgcggcgccaagcgtatcgccggtcaccagcacagcctgcggcggcgtaggccctggcacatccaaagcacttatttgcggtatcccgtacctatcggcatcggcgaattgcgcacgtagcgtgccttgattaaccgctgcggcactgcgactcggcgcgccgtaatccctgaccataaaggtgtcggcacccgagcccacacgcgaggaagaacctgaggcagttcggggcgagttagtattctgttgcatgaaaaagtccttttgaattgatgctcacgcaacccgcgtgaaccgcaggtccgacgacgtaacgttacgctggggttccaggtccgctccccaacagtcgcgacctgcgtcgtaatgaatgcccgataccgtaccgtccttcagcgccaggccgatcacacgcagctggcgcaccatcaacgtcgcccactggcgagagcggcgcagcgcgccgaacactgcgtctacggttgcgtatggcgcagcgtccagttgcgccagataaacagcgcccaggtcctgtcggatgtcgtactgctcgccctgtttggtgtgcacgctgacctgttccagcggcaccgaagggtctgtcatcggtggcaggctcacagtcacactgccgaccttcaatgtgtcgttggtcagtacgatatgccgttgctcgatcagttcgccaaggcttgcagtgttgattcgccaaaacgatgcattcgactgtttcgccagtgcgcccggcgtggacaggcaaattgttgaaccggtgctgggcaccacttcataagtggaggcccgccccagcaacgcgtacgacttctggtaatgcggcggtgccgggatcacgattttctgaggcaccgactgcaaccagacacctttggcgctgtgcggccgaaaaaacggatgggtgcctacacgcttgaccagagccgaacggccgtcgaaggtattgaaaccaggcgaagcacggtcttgggcgtaagtttgctgagcagcctgaacccgataggagacgccatcgttcatgaccagttcgaatcgacaatcaagcttcaagctgaccgcaatgatgttggacgtcacgttggtgcgcgtcgaagatcgatcgctggcgtagttggcgagaaccaattgcccgccatcggtgaatgtgagggttaacctcacatcgctgtaggtcagcgaatcgaaatgaccaacccggcgcaaggtcacacggtattcggccaaggcttgcagcagctcgcgcgacgagtaatccacgtacaacatgcaagccgtggtgtcgcctttgaggcgaacagccacctccttcctgctcggcccacgctcaatgaagcagcggctcgaacgcccatagggcaccacgaactctccggcgctcagcaccttgtccatagtgagatcctggccacctcctcgcacggcaaccgcgacgctgacatcttcctcgccagccaatacaggtgtgaggatcggctcaagcatgtagccgtcttgcgtgacaaacagcaggttgtgcgtgttcaaccgccgctggctgtcgctgcgcgtatacagctgctcaagcctgatcacgtgctgtggcagttcgccgtcatcgccgcgccagactacaataaccagcgcgcactcttggatacgccaactggcgatcgcagccaatggccagcgcatttcaatcacagcaccttccgcccagtcctgatccttaagggtcacggtgccgcggttgctggcaatgacgtagcgatccttgcccgcgcccccatcgacccacgcgttggcgcccagcactaccaccgtatcattaccatctcctgcctcgacacgatcattatcaccctcggcgatcaccgtattggcctgggccgaacctttgacatggttggcaacgccagccggagtcgagacgttttcaatcgaatccaggctaatcgagtgatgaggcgtcggggtgccgaggtctttgcgccgagcgacagtgcctgcctgcagatcaatggcataaccttgcgccccttcctgataggttgccgagttggacaaattgagcgtatcgctgccggccccgccatacagttcactgaccgggccattcgcgagcgctgcatccagtgtgcccgccggtatctcatacgtgaacacatcagctttcgcgccgccggtgagttgcttgtggcctgcgccgaactgaaaaatattcgggttgtcggtcaagcctttgaccttgtcgttaccgccccccagtcgccagagcacagcagcattcacccattgactgccagacaccacgcctggaatctggtcaaccggggtgtttgaagcatccacatcgtcatccaggtcaacgaccgttggttcattggtgtcgatgtaggcatcctcgccctcggcttcattccatcgacgcttccaatggcgtaccggattcaggcgtacctcaaaccggccatttaccaccgcctgtacggtgcccttgagcgcacccatcagccaggcttcggcctggcttgtcagttgctgcgcatgctgcttttgcatttttgccagaacgtaccggtcacgcacgtctcgctgcggctcccggccttgaaacgccaaccacccggcctgcaggcgctcaacgatactcagctcgatgtaatcatcaatttcatccacctgacgaaccgcagaatagagctgcatccccagcatcaacaccacagctgcagcgatacccagcgggccggcaacgctgaaaccggctgctgctgcaacactgaggatcacgctgatgcttgcccccaggatagtgaagccggcgctcacgtaatggtccagtgcttctttgccggtacttttcgccgctttggcaagcgatttctgggcactgatgatgtcaaaaggcagggtcagtaccaaggcaaacaggctcgcgccccgctgcatgatcttgcccaacgtactggcgttaaagcccgcgaacaccttccgaccgttttccagcatccgcttgccgaaccgctcaagcgccagctccagtgcctcccccgtcagattggcgaacagctcagcaccggtgactaccgtctcgtcgatgtcgccagtcttgatcgcatcggtcaacgcgctgattgcactgtaatacccgtaaaccccaagcccggcgcctatcaacgccaggcttcggcttttcttcggctctacccattgaggcatcccttccaactgcgacacttggttgaggttggttttttgcaccttgcacagcaggctgtcgagcttgtccattgcccccgaatgctccccacccgcctcaggcagcagcaatggcggggcctgtaccgagcgcaacgccgcgaactcgaataatagagcagcgctgctgccgctgaccgaatctgcggtgcttagatagcgctgcagctcaggcaccgagaaacggatcgaatcaagcagcgtctgatcggcctcgcgcacgtccaagtgtctggctctcaggggcttgcccgacatgctggcgcccatggcggccaggtccgcgcgctgaagagtcagctctccaacaatcagcgggcccaagcgctgatcgagcgcgagcaaagtcggataccttttctttgcaggtggttcgcttgtcgccatgagtcttattccctatgccataccattgaataacgctggctgcaggcatccagagcctgcaacagggacatgatcgcggccaacgcgctctttgcagctgtagatgtctatgcgtgcggacgatttacacagagacccttttgagcccgcattacgagcgagtaaccttggcgccgagccaaaccttgggagcaaacatggaactgcacgtagtcatcaatggccgcaaggacctggccgaacagctctaccagcagttgcgcgaagccatcgccaccgggcggctgtcggcaggcgcacagctgccccccagccgactgctcgccgaacaactgggcatctcgcgcaagacggtgtcggatacctacgccaccttgacctatgagggcctgctggttggcaagatcggccgcggcactttcgtcaatgcgtgggcgccgcaacccgaccgcgtgcaaaccgccaccgacctggcgtgcgccgccaacctgggcaaatgggccgcactgccctcgcccatgggccaccccgcccgtgacgatatcctgcgctacgaatttatcggcggtgcgacgacacgccaccacttcccccaggacgaatggcggcgttgtacccaggatgcgttgcgtcgtatcgcccagaacagtggtttttacagccagccagaaggcgtgcccgccctgcgcgaagccatcgccgggcatattgcgttttctcgcggggtcaaatgcggggcccgcgatatcgtggtcaccaacggggcacagcaggcgctggacctgattgcccgcgtggtgcttgagcccggcagcctggtcgcgatggaagaccctggctacagccccgcacgccaattgttcgtcgcgatgggcgccaatgttgccagtgtggccgtcgacaaagagggcctgcaggtcgaccagatcccggatggcacccgcttgatctatgtgacgccgtcccaccaattcccccttggcatgcccatgagccaggcgcggcgcgaggccctgctggaccgcgccattgcgctcggcgcgatcatcattgaagacgattacgacagcgaattccgctacgaaggccgccccactgactccctgcaaagcatggatacccgaggcgtggtcacctacgtcggcaccttctccaaaaccctgtcgccggagttacgcctgggctatgcggtgctgccgccggccatctacggcgcggtgctcaaggccaagaaactgaccgaccagcacagcgctaccttgccgcagtgggcactggccaagttcatcagcgaaggctacctgctcaagcatattcgtcgctgtcacagcctctatgcggggcgtcgcgaacgcatattgcagcgtctggcgggcgatctgtcgccgtggttcgaggcagtaccgacggtggcaggctttcatctggcggcgctgtgcaaggtgccggtgaatattcccttactgatggaacgggcgcgtgaggtcgaggtggggttgtatcccctggaggtgttctttcacgacctgccggtgcgctcggggctgattctggggttcggtgccatcgagaccctggacattgacccggcgctggacaaggtccgcgatattctcttgcagattggctaggcggttttccggcgcattggtcattggtggcaggccctctgcggcgtagggtgaagcggtcttgaacccgatggaaccctcctcatgaaacgcttattcgctgccacactgatgctcgcctccctcagtgcatttgcccacgacccggtctacaaccaggaaacgctcaaggtgctgcaagagcacgccttgaccaacgtgccgggcaagaaaaccatcatgctcaccgtggactacgcccccggccaagccaccgtgccccacagccacaccggcaccgccgtggcgtatgtgctcgaaggccagatcacctcgcgggtcaatgatgaaaaggcgatcacctacaaaaccgggcaatcgttctacgagccggccggttcgcggcattttgagtcaagcaatgccagccagacccaaccggccaaactgctggtggtgatggtgctggatgacaaggctgaggtactcaccccacttcccaaataatcagcaacacaacaaaacccctgtgggagctggcttgcctgcgatagcggtgggccagtaaaagatgagctggctgatacaccgctatcgcaggcaagccagctcccacagtttcaaccgtgtctggtcagggacgtttgaacaggttgcgcaggtgttcaatacgcgagcggcactcgcaaccctccaagtggtcattaaccatccccatcgcctgcatcaacgcatacatcgtggtcgggccgacaaaggtccagccgcgcttcttcaaggctttcgataaccgtaccgaagcgggtgacgttggattggccgtccagtaagccatatccaccactgccggccgctcttctgcgcagggctcaaacgcccacagccagcgcgccagcgagccggtctcctccaccagttcacaggcccggcgtgcattgttgatggccgagacgatcttcgcgcgattgcgcacaatgcccgggtcgctcatcaaccgctcgatgtccgcctcgccgtactgcgccacccggcgaaaatcaaagccctcgaacgccttgcgaaagttttcgcgcttgcgcaggatggtgatccacgccatccccgcctgaaacccctccaggcagatcttctcgtacagcgcgatgtcatccgccaccggcacgccccactcgtggtcgtggtaatgcaggtacgcaggcgctgcagtgcgccaggcgcaatagatgcgccctgcttcgtcggttgtcagccctggttggtccatccatcacctcgtatgccgaaggcgatgatacgcaaaaaaaattaatccccgccaaccgctcaagcatcgtgcttatcgaccaactggtcagaccgggacctgccaaccgccaaatattttcttgtgatttgaaaaaaaccgagcgtagactggccccgcactggacttaccggtaagaccacaacaattaagccctggaaccaccagggcaccgaatagagatccctcccatgctcagatggtgctcgcgttcgattttcctgcaagtcgtgattggcctgatgctcggcatcgcctgcggcctggcccttcccgaattctcctcgcaactcaaacccttgggtgacggctttatcaagctgatcaaaatgctgattggcctgatcgtgttctgcgtggtagtcagcggtatttccggcgcgggcgacttgaagaaggtcgggcgcatcggcctaaagtcggtgatctattttgaaatgctcaccaccgtcgccctggtgctcggcctgatcatggccttcagcaccggcattggcagcggcgccaatattcacctggagcaactctcttccgccggcttgaatgagctggccgacaagggccagcacatccgcggcaccagccagttcctgatggagttgatccccaactcggtggtcggcgcctttgccgacaacaacgtgctgcaagtgctgttgttttcggtgctgttcggcagcgcgctgaacctggtgggcgaagcggccagtggcatctcgcggctgatcaacgaattgagccatgtgatcttccgcatcatgggcatgatcgtgcgcctggcgccgattggcgtattcggtgccatcgccttcaccaccagcacctatggcctggactcgctgcaacatctgggcagcctggtggggcttttctacctgacctgctttgccttcgtggcggtgatcctcgggctggtgatgcgcctgtcgggcctgcgcatgttgccgctgctcaagtacctgcgcgaagagctgctgatcgtgatgggcaccgcttcatccgacgcggtgttgccgcagatcatgcgcaagctggaacacctgggcattggcagctccaccgtgggcttggtgattcccactggctactcgttcaacctcgacggtttctccatctacctgaccctggccatcgtgtttatcgccaacgccaccggcacaccgctgtcgatgaccgacttgttgaccatcctcctggtatcgttgatcacctccaagggcgcccatggcattccaggctcggcgctggtgattctggcggcaacgctcacggcgatccccgcgattccggtggtcggcctggtattggtgctagcggtggactggttcatgggcatcggtcgggcgctgaccaacctgatcggcaactgcgtggccaccgtggcaattgcgcgctgggaaaaagacattgatatccagcgcgccaacaaggtgctcgacggccagcaaggctatgccttccaggccaagaaaccggtgctgccggcgcatcaggagttctaggacaacacccatccaatgtgggagctggcttgcctgcgatagcggtgggtcagcgtcaactgtagtgcctgacactcagtcatcgcaggcaagccagctcccactttggaccttcgccagactgaatactgtatgagcaacatcaaggagccttcgacgtgatcagcacttcaaccgtcgtcaattcagtggtagaaaaactgcgcgccgccttggcgcgaggccagtggcgccgcggtgaaatgctgcccggtcaacgcgaactggccgaacagctgggcatcagccgcccgagcctgcgtgaagcggtgatcgtgctggaaaccctcggcctggtgcgctccatgccgggcaaaggcgtggtcgtgctggaaagcagcgtcagcgagccgcaatcgagcgacgccgtggccgatgccagcctcgaggatatcctgcaactgcgctacaccctcgaacctttcatcgtcggtttggtagcccagtccatcagcagcaaggaaatcggccaactgcgcctgaccctgatggacatgcgcgaagccctggatgccggcgatgccgaagcgggcatgaacgcctatatcgacttccatgaggagctgttcgccctgacctccaatccgatcttccagaacgtggtgcagcaaaccagcaccgcgctcaaacaaagcgctcaggtattgcgcaactcccctgaacacctggccgaacgccttcaagagaacgaagccgtggtccgcgccatccgcaacaagaacagcgccctggccagtgccgaaatgcgccggcacatccttcaggaaggcctgcgcatgggcattcgcttgaatatcccggacgaccatctgggcagttgattttcggagaccggccatgaacgctcacgccctgcaacgcaattgcaccctcacgtccttacgctggacgcccgaaaaaaagccctcggtggacgacatctacccacgcttgttcgacgccattcttgagcaacgcattgcgcccgccagccgcttcaccgaagaaggcctgggcgagctctttggcgtgagccgcagcgtgatacgccgggtactcgccaagctgtcccatcagcaagtggtcatcctgcgccccaaccagcgcgcccaggtcgccgcgccggatgcccagcacacacggcagatcctggaagcccggcgcctcaccgagattaccgtggtgcaactggcctgcgcccaggccaccgcgatgcagattcgccaactgcgcgagctgattgcacaggagcgcgacgccattgagcgtgaccagcgtggcccggcgatccggttttcgggagagtttcatctgcaactggcgcacatggcaggcaacgcgccgctggcacagtttctcaacagcctggtgccgttgacgtcgttgatcattgcgcaatttgaagcaaaggcctgcacctattgcgcgtggcaggagcatgtggcgattgtggatgccgtggaacagcgcgacgctcacacggccgtcgccctgatgacccagcatctggatcacctggaaacccgactactcaaacaccactgactccaagtgagtaaagttaaaactgtgggagctggctttcctgcgatagcggtgtaccagtgaccaaattattaactgacccgccgctatcgcaggcaagccagctcccacattgatcgcattccagatcaaacaaaaagcccccgcatctcaggatgcgggggcttttggtttagcgaggcatcaagccggttgcaacaccgactggccactcaacgccaggtccagcaactcacggttggccaccgcgtacatggcgtagtccgtgcccactgcagcacgaatttccaccatcatggcgcgccagcgatcagccatgtcctgatgctgctcaagccacagggccacgcgggcttccatgtcttgtggcgcatcggccatttgcaggaccgaaatggtgatcgcccgttgctgccagtccacgtcatcgcggaaggcttcgcgggcctgggcctgccagttgttggccactggcagatcgctgatctgctgcaggtaccacggcaagtccagggcgctgccgacggcgaagtaggccttggccacttcggcggcgtcatgcccggtcacgtcggcggcttcgatgatcggcagcaaggtgtacaggtgggtagtacccgcaaccatgcgcgccaacaactccggtacgccggcctgggtgtaggcctggtagcggttctgccagccttcgcgggtcgggccttccagcagttcgtcgagcttgaggcccagcgccgccaggtgcggaccaaagtgcgcggtgtcacgcccggcgtcttgctcgttgcgacggctgcgcaggaaccagcgcgtagcgcgacggcccaggcgcatcagttcatccatcagctccagttgcacgtcagcggaaacctggtggtccagggcttcaatctgacggaaccagtgtgggagatggaagatgtcccgcacgatcacatacgcgcccgccacgttcgccgggctcataccggtcgactctttgagtcgctgaacgaaggtgatgcccatgtggttgaccagatcgttggcgatctgggtgctgacgatctcgcgcttcagacgatggcgacgcatggcttcgccgaacttggccaccaggctcggcgggaacgcggtctccatgtcacgggtcaggtactcgtcatccggtaccagcgacttgagcaacgcttccttgaggtcgatcttgctgtacgagatcagcaccgacagttccggacgggtcaggcccttgccggcagaggcgcgttcagtaagctgttcctcggtcggcaggtactcgatggcgcggtccagcttgccacggccttccaggtcgctcatcaggcgcttgtactcggcagcgcgctcgtaagccttgcgcgcagccagggacagggcctgggtctgcttgtagttgttgcccaacaccaggttgccgacttcgtcggtcatgctcgccagcagctggttgcgctgcttatcggtcatgtcaccggcctgcaccacttcgttgagcaggatcttgatgttcacttcgtggtcggagcaatccacgccaccggcgttgtcgatgaagtcggtgttggaaccgccgccattgaggccgaattccacacggcccaactgggtcatgccgaggttaccgccctcgcccactaccttgcagcgcagctcgttgccattgacgcgcagtgcgtcgttggccttgtcgcccacatcagcatggctctcggtgctggccttgacgtaggtaccgataccgccgttccacaacaggtctaccggcgccttgagcaaggcgttgagcagttcggtcggggtcagcttgtcggcctggatgtcgaagcgttctttcatctgcggcgagatggcaatgctcttcgcgctgcgcgagaagataccgccaccttcagacatgatgctggtgtcgtagtcggtccaggccgaacgcggcagttcgaacaaacgcttgcgctcgacgaagctggtggccgggttagggttcgggtcgatgaagatatgcaggtggttgaaggctgcgaccagttgcagtttgtccgacattaacaaaccgttaccgaacacgtcaccggccatatcgccgacgcccaccacggtgatgctgtcttcctgcacgttgatgccgcgctcacggaagtgacgctgcacacccacccacgcgcccttggcggtgatgcccattttcttgtggtcgtaaccggccgaaccaccggaagcgaacgcatcgcccagccagaagccgtagtcgatggcaatgccgttggcgatgtcggagaaggtcgcagtgcccttgtccgccgccaccaccaagtacgggtcatcgtcgtcatgacgcacgacgttggccggcggcaccagggcgccgtctttcaggttgtcggtgatgtccaacaggccagagatgaagatgcggtagcaggcgatgccttcggccgcgatctcgtcccggctgccgcccaatggcaggcgacgcggcaggaagccgcccttggcgcccaccggcacgatcaccgagttcttcacttgctgggcttttaccaggccgagcacttcggtgcggaagtcttcttcacggtcggaccagcgcaggccgccacgggccacgttgccaaagcgcaggtgcacgccttcgacccgtggcgagtacacgaagatttcaaacttcggcacgggcttgggcagctcagggatggcacgcgggtcgaacttgaagctgaagtacaacttgttctggccgttggcatcggtctggtagaagttggtgcgcagggtggccttgatcaggtccaggtagcgacgcaggatgcggtcttcgttgagcacctgaacgtcgtccagggcgctgaggatcgcttgctccaggcgttgctgcttgtcttccaggtcgtcggcagtgagcttgcgcgccaggtagaagcgggtcttgaacaaccgggtcaactcgcgggcgatgtcggtgtggttgttcagggtgctggcgatgtaacccaggtcgaagcccaggcgaatctgcttcaggtaacgggcataggcacgcagcaacgccacgtcgcgccatggcaggccggcggtgaggaccaggcggttgaacgcatcgttctcggcatcgccatgcacgatgtgcacgaacgcatcttgcagggtgtcgttgagctgctggatatccaggttcacgccttcggcggcgatgaacgcaaagtcatggatccagaactcacggccattggcgtgacgcaggcgatacgggaactcgcccagcacacgcaggccgaggttttccaggatcggcagcacgtcggacagcgccagcggcgtatcggcgtggtagagcttgcaatgcagttcacgttggccggagacctggcccagcggctgatagaagctcatcaccagcgggttggattcggtcaggctgttgaggtgctgcatgtcgaccacagccgaatgcgcggcgaaacgctcacggtagccggccgggaagcctttggggaaatccgccagcacgttggtgccctgggcttcgccgaagctttccacgaccaggctggcgtagtcgtcctgccagctgcggcaggcctgcaccacttctttttccagctgcagcgggtcgatgtccaggcggttcttggggtcaacccgcagaatcagttgcacacgggccagcacggactcggagaagaaggtccagaactcgcagtccgaggccttcagacggtccatcagcacttgctggatcttctggcgcacttcggtggagtagatgtcgcgtggcacgtaggccaggcagtagcagaaacgaccgtaggggtctttgcgcaggaacacgcggatcttgttgcgttcctggatctgcacaatcgacatcacggtgctgaacagctcgtcgaccggggtctggaacaggtcgtcacggggcagtacttccaccacctgggccagctctttacccaggtgcgccttggcctggaagcccgaacgacgttcgatctcggccactttgcgacggatgtaggggatgactcgcacgctttcgccgtacaccgaggaggtatacaggcccatgaagcggtgttccttgatgaccttgccgtcggcgctgatctcgcggatcgacacgtagtccgggtaggccgggcggtgcacgcggcttgggtgtgccgccttggcgaacgacagtacggtcggctcgcgcaggtaggccacagcgtagtcttcgatgcgcaggtcttcggcggtgaggccggcgcgcagcagcttggtcagaccgaggaaggagctggcgtcatattcgatatgaccgccgtccgcctcgtcacgtaccacgaactcttcgtagcccaggaaggtgaagtggttgcccaccagccattcgaggaagttcttgatctcggtcttttcttcgccgtcgatggcgaacgcactggcgtcgataccggccagcaggtcctggaccttggctttcatcggttcgaaatcggccacggccacgcgcacttcgcccagcacctgctcaagctctttgctcagcacgttcagttcggcggcattggcgcagcggtcgatctccaggtacatcagcgattcttgcaggatgccttcgccctgggtgcccttgggcaggatttccagcagctcgcccttgctgccacgacgcacgctgagcacggtggtttgcagggtatggatgctgtagccacggcggttcagctcggtgcgtaccgagtcgaccaggaagggcaggtcatggtgcagcacttcgaccgcggtgtgggtcgattgccagccatgacgttcgtaatcggggttgtagactcgcacttgcggttgggtgtgatcaaagcgctcaagcaggcgccaggcagacagggtgcaaccggccaggtcggaaaggcgacgctgggtcagttcgtccagggaaatgatgccgaaaaattgttcagcgaacagcgccacttgtggcagtgcctgttcactgaggtgctgcgccagtgccgcttgcagttgatgctggaagtcggccttgctggctgcggtgaagaacgccatctgtggtactccgcttgggcttgttattgatgaaagcgtcgcgtgttatccccttgcggggagaccgtcagctctgttcgctggtgtgctgacaagcaccataaacgaatcagggtgacaggtgggtgaagctggacaggacagtcaggtcacatacaacttccatacggcatgcccctggccaggtgacgatacgacgggcaggtcaggcgcctggcacagggcacatccgttgcgcagcttaacgagtgtgggaagagcgctgcttgcgacgctgcgacatattcggtcatcggtaagcagggtgccggttgcaacttgggcaaccccggattttcggtagaaaatcttgctactttgaacaccatcagtaccagaaatgaccgatccgggccgtgaggtcatgctcaagttccgacacaggatgaagcacaaaattcgccgcggtggcacaattgccctcccctacacaggattgccccatgctgcagctgaaaaccgacgccctgatggccaccccgtgcgacgacgaagaagacaacatggccatgctgtgctgtcacggcaagaacggcgaaatgttcatgctcacccgttatccggatgaagatgaagtggagctgacctgggactacgaaccttcgactctcgatgggctgaaagtgacgttgggcgacaccaccttattgatcgaactggcggccggcgatgccgatgccctgggcggtaaggaccagttggagatcgcccacagcaccgccgcgtcagacatggccgaagtgcaggaaaccctgcagaacatcctcacgggcacaggcactttcattcggatctgaatgcaccgtagatcccatgtgggagctggcttgcctgcgacgcgggcggtggggtctttcagccagaccgagttgaggccatcgcaggcaagccagctcccacagtgatcgtgctctacctacccagccgttatgccttgcgcaccgcaatcctgtaagtttcgccaaaaatacccatcaagccgttagtcgccgcaccccgcgatgcattaaagtaaacgccccaggcccggtgttttgtcacaacacccaggctcatcttttccaggaaccgtcatcgatggaacatcgtgaagcgctgcttgcgctgcgaacctttctttctacgcagattctcggccaggaaaaactcatcgatcgcctgctgatcgccctgctcgctgacggccatatgctggtcgaaggcgcaccggggctggccaagaccaaggcgatcaaggagttggccgaagggatcgaagcgcagttccatcgtatccagttcacccccgacctgttgcccgccgatatcaccggcaccgagatctatcgcccggaaaccggcagctttgtgttccagcaagggccgatcttccataacctggtgctcgcggacgaaatcaaccgtgccccggccaaggtgcagtcggccttgctcgaggccatggccgagcgccaggtcagcgtgggccgcagcacttacgagctgtcgccgctgtttttggtgatggccacgcaaaaccccatcgagcaggaaggcacctacccgctgcccgaagcccagctcgaccggttcctgatgcacgtcaagatcggcttcccagacgccgccgtcgagcgccgcatcctgcagcaagcccgtggcgaagcactcaatggcgaaaccaagcccgagcgtcgggtcagccagcaggccatctttgccgcgcgcaaggaaatcctcggcctgtacatggccgatgcggtggaggaatacctggtgcaactggtcatggccacgcgtaccccttccaagttcgacgcggaaatggccgagtggatcgcctacggcgccagcccccgtggctccatcgccctggaccgttgcgcccgcgcccatgcctggctggccggtcgcgattttgtcagccccgaagacatccaggcggtgctgttcgacgtgctgcgccaccgcatcatcctgtcgttcgaggccgaagccgccggggtcgaccaggaccgcgtggtgcaacgcattctcgacgtcgttgccgtcgcttgaagtcgatgaacgcaagcgatggcatccgcgtaaccctcagtgaattgattgagatgcgccaccgcgtgcgtgaggtgcagttgttctccacgcctggtcaacgtagcccgctggtgggcctgcaccactccaagctgcgcgggcgtggcgtcgatttcgaccaggtgcgcgtgtaccaggccggcgatgacgtgcgcaccatcgactggcgcgtcacggcgcgtacccaggagccgcacaccaagctgttccacgaagagcgagagcggccgattttcatcatggtggagcaaagttgccggctgtttttcggctcggggcaaatgttcaagtcggtgcttgccgcccaggccgccagcctgatcggttgggccgccctgggccataacgaccgggtgggcgggctggtgttcggcgacaacgagcattacgagatcaagcctcggcgcagcaagcaaagcctgttgcaattgcttaaccggctggtgcgggtcaaccagagcctgaacaccgagcgtcagccggaagccgacgccctgggtatggccttgcgccgtggccgcgaggtactgcgcccgggcagcctggtggtggtgatctgcgatgagcgcgccctcaccgaaggcgccgagcaacagctgagcctgttggcgcgccattgcgacctgctgttattaccgatctccgacccgttggaccacgccctgcccgccgccgggctgctgcgtttcgcgcaaagaggcgcgcaactggaactggacacgctgaatatcgacctgcgccaggcctacaaggcccaggccgaagcccgtatcgcccactgggaactgctcgcgcagaaactgcggctgttgttgatgcccttgagcacccagagtgaaatggtcgagcaactgcgcgaatacctcaacccgcaacgcccggttaaaaaaccatgagcagcctggaccaactgcaaccactgatcgccccgcccgccattggcttctggccacctgcgccgggctggtggctgttgctgctggtgatccccctactcggttggggcctatggtggctgcgccgtttcctgccggcccgccgccccgtggcgcgtgccgaacaaccgctggacccgttgcgtatcgcagccctggccgagctggctttgatgcccaagccctacgacggcgcgccggctggcgcctggttgcagcaactcaacggcctgctcaagcgcctgtgccgcaacgactacccttatagccagagccacaccctcaacgggcgcaaatggctggccttcctggacaaccgctgccccgccgccggcctgacgcgctggatggtgttggtggaaggtgcctacaagcccgaatgcaagctcgacgacaaagccattgctggcctgacccaagccgtcgacacctggattcgcaaacatgtttgagttcgcctggccgtggatcttcgccctgttgccactgccgtggatcatgcgcctggtgctgcccgtggccgacagcggcgaaccggcgctgaaagtcagctacctcagcgacctcgaaggcctggcccgccgccgtgcccgggtcaacctgcccggctggcgccagcaagccccattcgtggtgctgtggttgctgctgctgaccgccgccgcccgcccgcaatggctgggcgaccccttgccgattgcggccagcggccgggatttgctggtggcagtggacgtctccggctccatggattttcccgacatgcattggcaggacgaggacgtcagccgcctggccctggtcaagcacctgctgggagactttttggaggagcgtgaaggtgaccgcgtgggcctgatcctgttcggcagccaagcctacctgcaagcgcccttgacctttgaccggcgcaccgtgcgcacctggctggatgaagcgcgcatcggcattgctggcaagaacaccgccatcggcgacgccatcggcctggccctcaagcgcctgcgccaacgcccggcgcaaagccgcgtgctgatcctggtcactgacggcgccaacaatgccgggcagatcgacccgttgaccgctgcgcgcctggcggctgaagaaggcgtgaaaatctaccccatcggcatcggcgccgatcccgagcaaaccggctccctgggcatccttggcgtgaacccaagcctggacctcgacgaaccggcgctcaaggcactggccgaggccaccggcggccagtatttccgcgcccgagacggcgaggaactgctgaaaatcaaggacaccctcgacacccttgagcccgtggagcaacaacccacccaggcccgcccggcccaggcgctgtacagcggcccattggccttggcgttggtgttgagcctgttactggtgatccaggaacgctggccgaacaacgccttgcagcgcggcttcaacaggctgtcgagcaagggcatctttttgcagcagcatcctgaatggcgccagcgtttgcagcgcctgcgtttgcggaggcgtcgatgatcgcgctgtggccgcactggttgcgcccctggtggctgttattgctgcccctgcttggctggttgctgtggcagttgtggcatcggcaaaagcgcgccgggcgttggcagatgatcctgccgccggcgttccatgccgagttgctcagtggtggcaatggccgcgagagcaaatcgccgtgggtggtgcttggcattgcctggctgctggccgtgctggcgttgctgggccccagttggcaacgggttgaacaggccagccagaaaccttccgacccgttggtggtgttgttggaactgaccccggaaatgctcgccaccgacagcccacccaaccgcctggaacaggcacggcgcaagctgtatgacctgttgcaagcgcgcaccgatgcgcaaaccgccatcatcgtgtatgccggcagcgcccataccttggtgccgctgtccgatgacctggccaccagccgtaacctgttggaagccctgcgcccatcgatcatgcccgagcccggccaccgggccgatctggccgtggaaaaagccctgcgcctgctcaagcaaggcggtctcggccaggggcgcctgctgctgatcggctcgtcattgtccaaacaggaacgccaaggcatccgcctgcaactgcaaagtgcccaggctccgacgttgtcgatcctcggcatcggcagtcgcgaaggcacgccggtgactcaggaaagtggcgagttcctcaaggacgaccagggcgcgattctggtgccacgtctcgacagcccgaccctcaaggcgttcgccagcgaaatgggcggccgctaccgtgcggcgcgcctggatgacaaggacctgcgccaactcggcatgctcgacagcgcccaagccctgcgcgacgacggccaacggctgcgcctggacacctgggccgatcagggttactggctgctcttgccgttattgctgctggccgcgtgcgccgggcgtcgcggctggttgttctgcctgcccttgctgctgatgggcgcgccgcaacccagctacgcctttgggctgcaggacctgtggctgcgccccgaccaacaaggccagtacctgctcaagcacaaacgcccggccgaagccgccgaacacttccaagacccgcaatggcaaggcgtggcgctgtacgaagccggcaattacgccgaggccatcaagcggtttgcccaaggcagcgacgcctattcccactataaccgtggcaatgccctggccaaggccggtgagcttgaagcggccattgatgcctatgaacaagccctggaagcccagcccgatttgcaaccggcactgaaaaacaaagccctggttgaaaccctgatgcaggagcaagcgcagcccgagcaggacccgcctgcaaaaaacgaagatgacgaaaccgcccaacccggccaaactgcgcaaccgggcgccagcgcacaaacggcacagggcggcgagcaatcgccccacggccagggcgaagcgggcaccgctgagactcagacagccgccacgccacagcctggcggtaatgaagtaccaggcagcgaactgggcgacgaacaaaccaccacgccgcctttgcgtcctgccgacacacgcctggaaggcgagcgccgccaagcgctggagcaatggttgcaggagatcccggataaccccggcgaactgttgcgccgcaaattctggtacgaacagcaacaacatcaggacaccactcgatgagccgccgcaccacccttttgctcctgcttgcgttgtcggcaggccacgcccaggcggcggacctggtcgccagcgtagaccgcagccgcctcaactccggggaaacggtagagctgacggtgcaatcaagtgatgtgacccagtttggcaaaccggacctgtcgcccctggacgcgcagttcgaagtcagcggcacccgccagatcaaccaactcaccacgctggacggcgacaaccacgccaccacccgctggatcatcaccctgctgcccaaggtgaacggcaacgtggtcatcccgccactgcaagtgggcgcactcaagacccagccgatcaccctgcaagtggtggaaagcgccagccagaacagcagcgccgaactggccccggtgttcatcgaagccaacctcgaccagaccagcgtatacgtgcaggcccaggcactgttgaccgttcgcgtttaccactcggtgtcgctgtatgacgacagcagcctcacgcctttgcagataccggacgcacgtgtcgaacaactgggcgaatcacgcacctatgagaaggtcatcaacagcatccgccatggcgtgatcgaaacccgctacgccctctaccctcaacacagtggcgccgtggtgattccggcacagaccttcagcgccaccctggtggaatcgcgaccgccccaggagaacaccttgcagggcaccaagccgggcaagatgattcacgtcagctccgcgcccttgcccttgacggtcaaacccaaaccggacgcctaccccgccgacgccccctggctgcccgcgcgcagcctgagcttgagcgaaggctggaaccccacgccggaccacgtgcaagtcggcgattccctgacccgcagccttaccgtggaggccgaaggcctgtccagcgcacagctgccagcgctgcccggcaccgaggtcaacggcctgcgccgctaccccgaccaaccggtgatggctaaccgcaccagcgaccgcggcctgaccggcagccgtgaagaccgcgaagccctggtgccgacccgcgccggcgagctggaactgcccgccgtggaagtggtgtggtggaacacccacgaagatcacctggaacgcaccagcctgccggcgcgcaccgtgcaagtggcggtgaaccccagcctggtggtagacaccccggccacaccgaccatcatcaccgcgccggacgatgaccgcctgtggctatggcaactgagcacactgatgctggcctgcaccaccctgctaggctttggcctatggtggcgcgcacgccggcaaccggccgtacaacgcgcagcccaaaccggccccagcccacgcaccttgctcgacgacctcaagcgcgccacccaggccaacgacccccacgccacccgccaggcgctggacgcctgggcaaggcaacaaccggaaaccctggccgacatggccgcacggtttgtgccgttgtcagatgccctggatggcttgaatggcgcgttgtacagcgaaagcggccaatactggctgggtgatgatctatggcgtgcgatcaaggccatccccgtggccgaacgcgagcaagacccggcgaccgacaccaccagtttgccgccgctctaccccaagtaacccccgagcctgctcgttcccacgctctgcgtgggaatgccgccccggacgctccgcgtccaggttttacgccctgtgcaacggtgacgcagagcgtcacgggatgcattactacgcagagcgtgggaacgatctatggcgtgcgatcaaggccatccccgtggccgaacgcgagcaagacccgaccactgataccaccagtttgccgccgctctaccccaagtaacccccgagcctgctcgttcccacgctctgcgtgggaatgccgccccggacgctccgcgtccaggttttacgccctatgcaacggtgacgcagagcgtcacgggatgcattactacgcagagcgtgggaacgatctatggcgtgcgatcaaggccatccccgtggccgaacgcgagcaagacctggccaccgacaccaccagcttgctgccgctctaccccaagtaacccagcctcaaccaacaccacaaaaccctgtgggagctggcttgcccgcgatggcggtgtaacagtgggcagatgtgctggctgatgctccgccatcgcaggcaagccagctcccacagttgatctgcatcgcctgctcggacgcctgcttgcactcagtgattacgacgcggcaccttccattcccgatgggggaatttgtacagatagttcaggttatccatatcgaaccgacgatcttctttaccgggcccaccgaagaagctgatgccgatatccagcttgcgcagcaatttaggccgtgagagcaactccttggccgcgtggtgggcctcgggtgagaacgtcctgtcggtggcgatcaggccggcggcttctttcaactcattgaagttcacatagctgtctgtcgcccctgcggcgaattcgcggaagtgatcgcgaatcaaccctattagttgccggtcactcacgcttgcgtacgggcgcaggtccgcggcgctggcctgggtttgagcgcttcgtgcctgacgatggctagcttggtttgagcgactgtcagcatccagctgatctggtagagcggtgaaagcgctagtcgaaggtgggtttactgaaaatgacatggtgggcctctgattcattcagggattgattgaaaaatccaccttatgggtggtcgtccctcaacctgccgttccatccatcaccgcccgctcgacatgcattgttaaaggccagcaatccatatccctttaatttgcaggacgtttcctagacaatcctttggccttgcgcctgctcatttcgctggctagccttcgcttcgtcgctgcaaatcagcgatcgggtgtggaaacctgggaatgagtaggcgtcatgatcgtatgcaaacgctcaatggcggctgtgcgcgggcagacttcggtctgactgggtcctactccccggtttccaccccgcgtatggctgccacctaatttgtcgtgtggaaacggcacaggttggcgccccaattgagtaggagctatacccatgagcaaaatcgtccccgacccacccttccccattttcgtcgcccacgaagacctgagtttcgaagacgctatcgccagcatctcctcgctactgcgctgcgccgccaccaccgccaccgaaaccgccgagggcctcaaaggcacccagcgcgacatggcctgctccaccgctcacctgatcgacatggcccgcaccctcgccgaccgcgcgctggattgcctgcaacccaaccccactaacaccccataacccctgtgtaggagcgagcttgctcgcgaaaaactcacgggcgccgcgtttatccaggaagcccgcgttatcgttgacgtttnnnnnnnnnnnnnnnnnnnnnnnnnnnnnnnnnnnnnnnnttacaggtaaactcccctccttttcatcttctccacggagttcgccttgcgtctgtttcatacctccgactggcacttgggccaaaacctccacggccaggaacgcgacttcgaacacgcctgtttccttgaatggctgctgggccaactcaaggcccagcgcccggatgtgctgttgatcgccggcgatatcttcgacacggtcaacccgccgctcaaggcccaggagcgcctgtatgacttcatcatcagcgcccacgaacagcaaccgacactgaccattgtgatgattgccggcaaccatgactccggctcgcgcatcgaactgccggccccgctgatgcgccgcctgcgcacccatgcactgggccgggtgttatggctggacgacgggcaactagatgccgaccgcctgctgatcccgctgcccaatgccaaaggcaagatcgccgcctggtgcctggcactgcccttcctgcgcccggcggaagtcaccggcgcacagctgggcgatgattacctgcgcggcatcggccaagtgcatgaatggctgatcgcggccgccaatgccaagcgcaacaaaggccaggcgttaatagccatcagccatgcgcacatggccggtgggtcggtatccgaagactccgaacgcagcctgatcatcggcaatgccgaggcactgcctgccacactgttcgaccgaagcgtggcgtatgtggccctcggccatttgcacaagccgcaaaaggtcaatggcgaggagcgtattcgctacagcggctcgccaatccccctgtcgttctccgaaatcggctacaagcaccagattctcgacgtgacgttccagggcgaaaggttggtgggctgcgaaccgatcctgattccccgctccgtcaacttgcaacgcctggaagccgcgcccctggccgatatcctcaagcaactcggtgaactgcccgacatcgacctgctcgccgaaacccagcgccacccttggctggaagtgcgcgtgcgcctcgacgagccgcaaccagacctgcgtcaacagatcgaaaccgcgttgcaaggcaaggccgtgcgcctggtgcgtatcgccgccgaatatgccggcacacgcggcagcgcagaggcagacgatgcgcaactgatcgaactcgaccagctcacgccccaggaactgttcagccgcgcctggcaggacagctacggcagtgaagtggatgaacagaccttgaaggacttcgccgtgctgctccaggaagtgcaacaggagggcgaacagccatgaagattctcgccatccgcttgaaaaacctcgcctccctggcgggcccgttcgaaatcgactttaccgccgagccgctggccagtgcgggcctgttcgccatcaccgggccaactggcgcgggtaaaagcaccctgctcgatgcgttgtgcctggcgctgtttggcgcggtgccgcgcctgggtgacaccggccaggccaagatgccggatgccgacacggatatttccatcggcgacccgcgcaccctgattcgacgcggcaccggtggtggctatgccgaggtggattttgtcggtgtcagtggccgtcgctaccgtgcgcgctgggaagccaaccgtgcccgcgacaaagccagcggcaagctgcagaacagccggcaaagcctgatcgacctggacagcgaccaactgctggccagccagaaaaccgagtacaagacccaactggaattggcccttggcctgaactttgagcagttcacccgtgcggtgctgctggcgcaaagcgagttcagcgccttcctcaaggccaatgacaatgagcgcagcgaactgctggaaaagctcaccgacaccgcgctgtacacccagctcggccgccgtgcgttcgacaaggccaaagaggccaaggacgcccacaaacagttgcaagaccaagccaccggcgtggtacccctggcccccgaagcccgcgccgagctggaccaagagttggccgaggcccagcaacagctcaagacccagcaagcccagctcaagcagttggagttgcagcacacctggctcaaggagctgcgtgaatggcaggagcgccatcagcatgctgtggagcaactgcaacgcgacgagcagacctgggccagccaaggcgagcagcgccaggacctgagcctgctggagcagttggcaccgcaacgccaccacttcctgcgccaggcagaactcgccaccttgctgacgcccctggcggcgcagattgcccagcacctggagcaacaaaccgccctgcactcccgccaggaacaggcgcagcaccagcaagtggccgcccaggcagcactggccgaggccctgaaacaccaggccgacgccgcccccctgctgcgccaggccatcgaggagcaaaacaccctcgcccacgtgagccgcgaactggccaagcgcaacgaggaaaaacaccagcacgaaagcgcctgtaccgaaggccaggccctgctcgacggcttgcaacacacgcaggcccaagtcaccgagcgcctgcagcgcctggccaccgaacttgagcatagcgccgccctcgccccgctgagtgatgcctggaacgcctaccgtgaccgcctgcaacaactggtgctgatcggcaatcgcctcaaccaaggccaggccgagctggggcaactcgaacagcgcgccagcgccgccgccgaacagttcacccaacagcgcgaagccctggatttgctctaccacgaggccggtgccgaaccgcacgcggtggccgaacaaatccaattgctggccagcctgctgcaagacaatcgcaagcaacagcgcgccttcgaagacctggcccgcttgtgggacagccagcaacagttggatcaacaggcaggtgcgctcacgcaaaggctcgccgaggccgcgcaaaaacgcgaacaactgaaccagaccggcctgcaaaccaaggccgaacttaccgttgccgaacaaaccctggcggtgaccaagcaactgctggagcgccaacgcctggcccgcagtgccagcgtcgaggagttacgcgagcagttgcaggatgaccagccctgcccggtgtgcggcagccacgaacacccctatcaccagcccgaggccctgctgcaaagcctgggccgccatgatgaaagtgaagaggcggcggcgcagaaagccgtcgacagcctcaaggaaaaactcactgaattgcgcggtgaagtgggcggcctgatcgctcagcaaaaagaattcctgcaacagcaggaacagttggctacccagcagcagggtttggcaccgagcctgcaagcccatccactgtgcgcctcgctgttcaaccaggacgtcgacaagcgcagcccttggctggcccaacaactggcccaattgacgcaaagcatcagccaggacgaacaacgccagggcgccctgctcaacctgcaacagaacgccgggcgcttgcagcaacaattgcaagcggcccaggacgccagccagcaagcccggcaattgctggtggaccagcagcggcagctggccggcgaccgcgaacgcctagaggcggaactcagcgccttcgccagcctgttgcccgccgagacgctggagggcttgcgcagcgcgcctgcggcgactttcatgcagctcgaccagcaggtcagccagcgccttgagcaattgggccatcaacgcgatgagcaggccgagcagcaggagcgccaacaggccatcgagaaacaacatacccaccagcagcatcgtcagcagcaactcgacgccttgaatctgcaagtcgcagagctggctgaccagcaacacgccgtccaggaaaaactccgtaccttgctaggagagcaccccagcgccgaacactggcaacagcaactggagcaagctgtcacgcagtcccgccagagcgagaccgacgccaacgaggaactgcacgctgtgcacacggccctggtacagctggccgccgacctcaacgcccagcagcaacgccagcaggcattggaggcggaacagcaagccctcgcgacacgcatcagcgaatggcgcgccctgcaccccgaactggatgaccagggcctggcgcgcctgttggcctttaatgaggcccaggtcgcgcagttgcgtcagcacctgcacagcagcgaaaaggccgtggagcaagccaaggtcctgctgcacgagcgcgaacaacgcctggccgaacaccgggccctgcacaacggcaacctggaggccgagcaactggacgccaccctggcaacgcttaaccagcaactgatcgagggtgagaaacactgcgccgaactgcgcgcacgccagtccgaagaccagcgtcgccagaacgccaaccaggccctggccgaacagatcgccaaagcttacgagcagtggcagcgctgggcccgcctgaatgcgctgatcggctcggccaccggcgataccttccgcaagatcgctcaggcctacaacctcgatttgctggtgcaccacgccaacgtgcaactgcgccaactggtgcgccgctaccgccttaaacgcggcggcagcatgctcgggctgttggtcatggacaccgagatgggcgatgaactgcgctcggtgcattccctgtccggtggcgaaaccttcctggtgtcgttggcactggcgttggggctggcgtcgatggcgtcgagcaccttgaagatcgagtcgctgtttatcgacgaaggttttggcagccttgatccggagtcgttgcaattggcgatggacgctctggatggtttgcaggcccagggccgcaaggtggcggtgatctcccacgtacaggaaatgcatgaacgcatcccggtgcagatccaggtgcaacgccagggcaatggcctgagcacgttggaggtcaagtgagcgaagcgctgctgtattcgttccggcgctgcccctatgcaatgcgagcgcggctggcgctgcgttattccggcgttgcggtgagcatcgtcgaagtcagcctgaaagccaagccggccgagatgctcgcgctgtcgcccaagggcacggtgccggtgttgagcgtcgaagggcgagtgatcgaagaaagcctggagatcaagcagtgggcgctggcccagcacgaccccgaaaactggcggctacagggcgatccggcggtgtatgcgctgattgaagaaaatgaccaggtgttcaaacatcatttgaatcgatacaagtacgccgagcgctacccggagcaaccgatggaacactatcgggccgagggcgaggtgttcttgcgcaagctggaagatttgctggcagaccgtgagtatctactcgccgatcacctgagcttggcagatgcagcgctggcgccgtttgtgcgccagtttgcccacgtgaatcgggagtggtttgcgggcacgccctatcggcgtttgcaggcctggttacagcggtttctggattcaccgttgtttagagcagtgatggcaaaaccctgaggccaatccaatgtgggagctggcttgcctgcgatggcatcgactcggtacatcagctataccgagtggtccgcatcgcaggcaagccagctcccacattggaccgtggctcagtgctgggtcttgtgatccagcgccgcatagaaattggcgctctgttgcaggtatttctgggtataggccgtgacattggattttttgccggtgacttccacgctggcggcggcaggcaatgccacggtggcggaaacagcagaagcagcaatgatcgagaagagattgaaattcatggcggtaacccttgtgtgcgtttggttgggtggcctgggaaggccttggaacccaacttacgcccgagggttgaaccttagaaatgctttgaaacagtagccgttatcactgcgattaatacaaaggctcaggccccgcagtgcggggcctgtggcttattgacgcaccaggaacttgaggtcactgggggcatcaatcggcaatttctgcacggttttacccagcaggccggtcttgaggtcgcgctcgacgacgacaatttcattgcttttctggttggcgatcagcaggaatttgccgctagggtcgaggctgaactcacgcgggtggtcgccttcaacagagcggcgctggatttccttgaggtgcgcggtggccgggtcgatgctgaataccagcatctgattggctgtgccacggttactcacataaaggaacttgccatcgctggaagcatgcaacgccgcgccggccttgtcggacaccggttggccggcggcatagtcgagcaactgggtttgcgtcagcttgccctcgttgtaatcgaacacggccacctgggcgctcatctcagtggtcagccaggcgtgcttgccgtccgcactgaacagcaagtgacgcgggccgctgcccgggggcaactgcaccgacgccgggttggccgctgtcaatggcagttcgtgattggccttggggtcgtagcggtaggcaaacaccttgtccgcacccaggtcctgcacgaatacgtacttgccgtccggcgacgacaccaccgaatgcacatggttggacgcctggcgctccgggttcacacggctggccgggtgcccgctcaactgcaccggcgccgacagcttgccactggcgtccaccggcaggatcgccaggctgccacccgggtcttccaccaccgaatagttggccacgaacaggtagcgcccatcggcggccacgctggaatgggtgggctcattgcccaggctctgcacctgattgatcagggtcaactggtggttctgcgggtcgatgctgtagctgctgacacgccccaccgggtcttcctggcccgggccgttttcattgaccacgaacaactgcttctggtctttggaaatcgtcaaccaggacgggttggcggttttcgccgccagcactggcttgccgctgaactgcccggtgcggctgtcgaactgcaggcggtaaataccctcgctgctaccggcggtgtagctgcccaccagcagttcatgcagatcgctgggcgcggcctgtaccgacatcgcaccgacactgcctgccatcagcaggggccagaatttacgcatcatcatccgcttcgtcctcatcgttattgttgccggtgaaggcgctcatgcagatcaagcggtgctcgcccgactcaccggtaagggtccagctttgcagcgtctcgtcaaatgtggcagcgcccacctgcgccgagctgaagctccagcgtttttcggcccggccatccatggcagtaatcacgagctttagttcagtcaactcgaaatcaaaggcatgcaggccgtcgatttcaagcatgtcgctggtttcaagcagggtgcgcaggggggcggattcggcagtcataacatcaatcgttcagaggaaagacctcatgataggtcaaatggttgctacggcgtaaatcctgacgtgacctgcgccgcgtttacatgccgccatatatccctcgccctactccaccccacgcaaaatcaagcgctagcggtaagggcatgccaatggaaatggctgtttacctattgttgatttcactcgaaaacctggctcggtagtttccactcgcctgctcgcatgacgcgaacagggtcacctccatgacgagcatgactgcaaccacaaggaagctgcacgatgattcagggaaactacccccagcgtttttttgaccaccacctgcccgtttcactgccaaccccggctgccggccagacggtcgatacccatcacgaagccttatcgaatgccgcacaagaccaaccgctgaaccgcccccggcgtgcatccgcaccgttgcgcaccgcagtgaccaccgctcccaccgacaactcgccgcagatcaccgcaacggcggtcgcccagcagttcgacactcgccctacgttgcgttcagtggtgtcgggcatgcttgaggaggcgatcaaaagcctgtaccccactttagccttcaatctcgccgaaacggcagtggccgaacccatttcaaccgacccaccccagtaccgcctgacccctttgctggacatcgccctgaagcacctgaccaccgacggcgacctcgactttaccgacaaacattcactgccctgcaccctggtcgatcacgccaccgggcatagcctcaagcctgcgccctcctccaacgccttgatgccgggcattgatatgcaggccattgaactggctatccgcagcctgcgcgcgcccctcaaaaaagcgttcgaacaggccatgctcaagcacttcgtcggcagcgctgacgctcacgctcccggtgccaaccgttggcgctggctgagcgacacactgcgggacaccttgaccaccggagccctgaagcaacctgggctcagcgctcaacaacgcgagaccctcgaccaggtcgtgacgtacccggatcgtgcgcagcgccaagcggccaaaggcgatggtgcggcacaggttttcatccttgattctgcggtgagccacgccggtggcagcgcctcgcaactcaccccagacctgctgatcactcgtcaggtcgatggccgcacgcaggtactgcacgccactgccgccggcgtggtgacgccgtatgactccttgcaggcgttcggcaaagcctggggcaaaaaaatgggcgatgccttcgttttcgacaccctgaactggaagcgccaggagcctgcggggaatattttcgatacccaggcggcggtcatcctcaatgccatggtggagaacgttgcgtccatcgaggcgcccaccaccggctcgcttgaggcgctggagcaggcgttcacccaggccagcgacccgagcccctggtttctcggggcctatgcacccgacgcgcgcgagcttgaacgtctgcatgaacagttgcccacctggttcggctcggcaagcgccgcagaacgcgacacctatcgacagcacgcactggccctggccagcagcgtgcgccgcaacaatggccgcaccttcctcgacggcatccccgatatccgcacctacgccgagcaacagctcgaccagcatttagccggcaagggttacacggccaagaatgtggaggtggtgttcaaggtcccggtgggcgatatgggcagcaactacctggaacgggtgagaatgagcctggtggacatggccctggaaaatctgtcgggcctgcccaagggtgagatggaagtccacctgcatgggcagcgggtcagcgatgccagcctgccaaaaatgctcaaggacctgatcaacactgtggacattggcggccactaccccgagttgctcaagcgtgaactgctggacgacagcccggcagcccgtgatcggctggcacgtttcatcgagcaggtacccctgcagctcgcgatgcaggccttggaactcaagctcaagggcgaagccggcatcaccgcccagggccacgcgtttatcgaagcaatcacccagcccggcgcgggcggcaaaagtgcggcaggccaagagattaccgtgcgccccctggcatttgtacgcaaaccaggagcgacgccggatgtggtcgccaatatgtttatcatcgaacctttgtccagcggtagcggcccacatatcctctatcgtcctcaattgaaaccggcactgctggaattcgccagccgcgacgcgctgctggaggccatccgcgaacccggtgcgctgcaagacagcgtgctggcctggttgccggatgacaaagcacgggcggtgtacggtaatggcggttttcacacgcccaatattgcgcgttttagcgtattcaatgagtttgacccgcctgctacgcccaagccgaccaccctggctgtcgacggctatgccgctgccaccacgctacgccaggacctgctcaacggcgacctggccaagcactggttccactccaatgccaacagcctggtcaccctggctgaaggccaatcgacctccgatgctgaaagtcgttgggcgtcctacaaggagctcggctggctgttgttcaacaccctgctgccgttgatgcgcgggccgggtgcgatggcgggctggttgctgcaactggtcaatgccgaaaacgacatcaagcgcttgtccaccgccaacgatccggacccggccggggcaatggtcgatctgctggtcaacctgggcatgaccttgacccatgtacccgtcgccgaatccaagccagcgcgcacctttgagccatttaagccaggagccgatgccagcgaccctgcaccccgcccccgccagagcaacgaccccatgcgccctgcgcctgccatccaccaagacccgagcgcaccggtcacccaaggcttcggtggtgacggcacggccattgatatcaggctgtcgagcccacgcggattaacccccgagctgcgtgcacacatcgactcgttcacagtgcccgctccaacagcccccgacactccaatcggcgaaggcatcaggaagggcctgtatcaagtggataaccgctggtacgcctgcatcgacaaccattggtttcgcgtcgcaaccgacctggacggtccctacgtaatcgacgaacacaacaaggctcgtacggcgccgccgatagcacgcgatgcccagggcaactggcattttgacgtggcgcccagactcaggggcggaatgcccaagagcgcaagcctgcaggaaacactcgggaaaagccggcgcgccaaggagcaagcagaaaagagctaccaacgcagtatgttggagcgcatgaaggtttcagcaaaacatgacacggcaatcgaaacgatcaaggacagcttcatcgaatatcagaacgcccggaaaaagctcaagaccctgcgcaatctggttaccgatgacacgtccgccaatcgcttcgctgctgcgtacgcgcaacatcgccaggccacactgatgctcaagagccgcctggatcaacaacttcaagacctcaagccgctaacccaggcactcagggcagccagcgaaaaaacgattgaaaccatagccccaaagaaaatagggggggtcgacgacctgtcgacgttcaaagagaaccgctctttggaataccaatacacattgcatacgctgattgggatagaggacttttacgtcaagctggtcaccgacgccctccagtacggcatcagtggcgcctcgatggcagagctggaaaatactgcgcattcaggctctcgggaggcctacgacgaactgaccagcgtgtttgaaatggcgtaccacgccaccgacaagttgctgacgtccagcgaggcgatcagatcggtgttcgaccaatggaaaaacgattcgcccttcgccagtaaacgtgccgaggagtacctgaagacgcgctacaaccggtcccccgccacaggggtgttcatggccaagatgaaccagttggtgctgctcaaacgcctggccaccgaatggactgcgctgtcccccgacatcgccgagcaatttcagatgaagcggttcttgaacgtcgacctgaaagccgaatacctggcgttcaatgacctgcgccagtacgagggctacagcctgagcgagcgcaaagccacgctgaccaccatcatcgacaaatacaaacaggtattgagtgacagcgtcacgctacaggaagagcatccggaacactttcgccgcgattatcaccagcagtttaccgagacactcaagcacttcatcgacgatgcagaagccgagctagtccagatcgtgaaggaagaacaacaactgattgcacccacccctgcacgcaaggaccggcaggccaaaccgcagaacaagcgtgtgttcaagaccgagcataaagaaagcttgatcggcacgctgcgccctcccgtacccggccaagccgtgaacattatcgacgtggtcgacccacagagcgggcaaccgatcgccagctacagcgaacaccctggggagcgtggctgggtgaagatcgtccagggccaacctacggcgccacgccctgtttcattacccaaatcctggtccagctacaaaagcgaagcgcaaagcttgatcgacggcgtgacgaagatagagcagagcattctttttcagaaaaagaagctcgacgaccccgtgcgacgagacaccgtcagcccccgcgactggaacgacatgctcgaagcccaggccaacctgctcatcgaaaaagcgcaacaggcgcaagccgcccatggcagcaaaccggaaaccgccgaatgggtggcacgctggcgagcaacggccgaggacatcctgcaaaaggcccgccgccataccgccgatggctatctggtacagacgccgacggcggaaaatgtcgattacctctggcgccacggttttgtcgatatcaacctggtacgacgcgacatcccgactaaaactggcgatgtcttcaccgaatacgtggttcgcaagaaaaacaaaatcgacgcgctgtggtacgcccacttccactatccacaaaagggctgggcgcgtgatgactacacagcggcgcatctgaagacaccggcccagcgcaccaagacccagaaggacctgattgccgaggccgggaacaacggggtcgtggagcgcatcatcaaggccggtatcaccaagccgctggatgaaagactgttcttgaaattgtgaaacccggcgcctgagggtcaacaaaaagccgcacagtgggctaatgccgttcagttaagcgtatatcgctcctacaaaaagccttaactgaacagcattagcatgatgtgcggcttttttacccggttttaatgcgcgaacaatgagttgcccttctgccccgccaacttctctggtttgatcaggaaccgtgccagggccggtaacagccacagcgcgccaaacatgttccacagcagcatgaaggtcagcatcaggcccatgtcggcctggaacttgatggccgagaagatccaggtgcacacgccgatggccaggcacaggccggtgaacagcacggctttaccggtggatttcaacgtctggtaatacgcctcttgcaacggcaggccggcgcgcaggaagctttccaggcggctgtagatgtagatgccgtagtccacgccaatccccacgcccagggccaccaccggcaaggtcgcaaccttgacgccaatgcccatgaacgccatcagcgcgttacccagtaccgaggtcagcaccagcggcagcacgatgcacagggtcgccgcccaggagcggaaggtgatcatgcacatggtcgccacacacaggtacaccaggatcaagatgatcagttccgattccttgatcacctcgttggtggccgcttcgatcccggcattaccagcggcgaggatgaactccaggccctccttgttgttttccttggcaaagtcctgcaccgcatgcacagcgcggtcgagggtttcggccttgtggtcgttgaggaacaccagcactggcgccagggagcaattgttgttgtacaagccatcggcacgggcgatggagttgttcagcacatccgggttgcgcgacagggtttcccatttcaggttgccctcgttcatgcccttgatcatttgcttggacacggtcaccaacgagatcgccgactgcacgccctcggtgttctgcatcttccacatcaactggtcgatgggcgccatggcttcatagcgcgagcagccttcggccttggtcttgaccatcaccaccaacacgtcggagctggtggagtaattgctgatgatgaaattgttgtctttgttgtaacgcgaatccgggcgcagttccggtgcgccttggtccaggtcaccgatcttcaggttctggctgtaccagaggccgccaccaaaggcgatcaaggccaggaacacagaaaccggcgcgactttcgggcttgcgaatttggacagcaggcgccagaagctatgttcgcggttcgcgtctttcttgctcttggcgatggcgcgcttgctgatgcctacataggaaatcgcgaccggcagcaggatcaggttggtgaacacgatcactgccacaccgatggacgcgccgatagccagttcgcggatcacgccaatgtcgatgatcagcagcgtaataaagcccaccgcgtcggccagaatggcgatcatccccggcaggaacagttgccggaaggtgcgccgtgcggcggtcagggcgttgtctgcctcgctggattgcagggcaatgccgttgatcttctgcacgccatgggaaatgccgatggcgaagatcaggaacggcaccagcattgaatacgggtccagcccgaaaccgaagaagtgcatcaacccgagttgccagaccaccgccaccaatgtcgtgctcaataccgcaatagtgctgcgcaggcagttggtgaaccacagcagcagaatcagggtgatgacaaacgcaacgccgaagaacagcaccaccatcaccaggccgtcgatcaggtcgccaacctttttggcaaagccgacaatatgaatcttgacgttggggttctgggtttcgaacttgtcgcggatcttgtcttcgagttcatgggagaacttgcggtagtccagggccagcaacttgccctggtcttgcgggtccgggtaggactccaacagcgggatatcaacgatgctcgacttgaagtcattggccaccagccgcccgacctggccggacttgagcacgttattgcgcaactggtcgaggctctggggcgaaccgttgtagctctgcgggatgacctccccgccggcaaacccttcttcggtcacttcggtccagcgcacgctggggctccacagcgacttgaggcccgagcggtccacaccggagatgtagaacacctcgtcgtggatctggcgcagggtctccatgtattcctgggtgaagatatctccgtccttggcctccaccgaaatacgcacggtgttgcccaggttggccaaatcgttgcggtgctccatcattttttcgatgaaggggtgcttgagggggatcatcttttcaaagctggtggacgggcgaatcaaggtcgcctgccagaacaggaagaggctcaccagcaggcagatgacgatcaccgccgggcgattgttgaaaatcagacgctcaagaaaggtcgctttatcgttgtgatgactgctcattgaatccccgccttcttattattttgagagctctgcgccggccgatgtggcaacccgcacgccaccctgccccgcgaggatcaaattaccattgcctgccgccgtgaccgccgagagtgaaatacggtccgggcgattgaacacactgaaggtctggccatcgtcatggctgaccacgacgctgccgccgttgccgaccacaacgatggagccgtcctccagcaaggtcgcacccgacaggccaaactccaacgcaccacgtgccgcgttcaattggacctgttcccaagtgctgccgaaatcggttgagcggtagaggttgccgcgcaaaccatacgccagcagggtctgtggctgtgcggtgctgatcacgccaaacagtgaaccctcgtaggggccttcgagtttttcccaggtctggccgtcatcgctggagcgaaacatgctgccttgctcaccgacgataaacaggccggcgtccttgatctgggcgatggcgttgaggtggtactggtcttcgttgtccaggcgatcgctgacatcgttccaggttttgccggcgtcggtggtctcgatcaacgcaccgtaggcgcccacggccaggccgtggttggcgtcgttgaaccacacatcgagcaatggcgcttcgcgtttgaggtcttgatattgctgggtccacgtggcgccgccatcggtactggcaagaatctgcgcatcatggccgacggcccagccgtgctggtcatcgacgaaaaataccgccgtgagcagttgccgggtgggcactttggcttgggcccaagtggcgccctgatcatcggaatagaggatatgcccacgatcaccgacggccaccaggcgcttgcctgcgtgaaccacgtcgatcatcaagcctttggcggccttgggggactcaatcgcaaagactgcggcggcggggctatcgctggcggccagtaccggcgtcgacaatacgctgccagcaagcagcgagagcgctgtggccagcagcgcaaccctgcgtgcggcgcgtgggcggcaaacaacccaacccatgacaggctcactcatagacctttctcccatttattattgttaggtcgtcttctctttcagggccttgaaacctgcaatctagagcgcctggaggaagcaggagccatcctatcgggctttggaatcgtctgacaatcggcgctacgttatcttttgttaactggcggcttttggccatgtgctgaatatagctgcatcagctgaaatgatggccccacgtgatcgttcccatgctccgcgtgggaatgcacccctgacgctctgcgtcctcaccgcgcaaacagcggggcgcagagcgccccgggcggcattcccacgcggagcgtgggaacgatcagggagaatgaatttttattccatctattgaatttagtgaatttttattccattaatggcgttcctgaaaacaataatccaaaggaccacgacgatgcgtgaactcggaatcggcttgatcggcacaggcttcatgggccgcgcccacgcgctggcgttcaacaacgctcgggcggtatttgaactgcccgtgcagctcaagctggccgccctggccgatgccgacaccgaacgcgcccagcgttgcgccagcgcctgggggtttgcccaggcccatggcgactggcaagcgttgatcaatgaccccaaggtcgatgtcgtggctatcaccacccccaaccacttgcattaccccatggccatggccgcgattgcggcgggtaaagcggtgtattgcgagaaacccctggccgtcagccttgaacaagccgacgccatgcgccgcgccgcccataccgccggagtggtaacgcgggtgggttacaactaccagcacaacccgatgatcgtgctggcgcagcagatgattgccaaaggcgagctgggccagatcatcagtttccagggtgagttcagcgaagacttcatggccgacccggcctccccttggtcgtggcgctgcgaagtggagcacgccggcggcgccctggctgatctgggcagccatttgctgtcgatggcccgctatctggtgggcgatgtgactcatgtctgtgccgatacccagaccgtgcacaaccagcgccccgccaccgccggcagcccgacctcaaaaaccattgccgtggatgaccaagtgcacgccctgttgcgtttcgccaacggcgcccgtggcacggtgagcagcagttggctcaagcacggctacaagaaccatctgagctttgagatcagcggcacccaaggcaccctggcgtttgaccaggaacgcttgaatgaactgcgtctgtgccgcatcggccaggacggtttccagcgtctgctggcaggccctgccctgcccggttatgcggcgttcagcccggcggcggggcatcagctgggttacaacgaattgaagacgttggaagtgcacgagttgatcatggcgctggccggccaaggggcgcagggcacagactttgaggcggcgtgggaggtggagcggttggcgacggcgattcgagttgcggctcaggaagaacgctgggtcagggtcggcaaactttaacgcaagccggtccgtcccggtcagccggataaacgccgccctcgcctccagtgtgggcatgcactgtccttgccactcataaggacgctcgcgaggaaggcttgacagccttccctcaaggctggagcaaatcgacgcattcacacttcaaccagtaaactttcccaactttaatcagccatcccccacctgaaacaaacaaaacctcatacagcaccgtacaaacaactctcacctcaaatacgcctattacttaccatcacacatcgaaataaataccctctggccttatataaataaataagccaccttatttcaccacaagaattcaagcacttcttaaaacccaacccaacgcaaacaatccgagacatattcatgtcagccattacaaattatcatccctcgtacgtaaaacctcaaacttacccgctctcggccgacgccccaacagccgatccacttgcaccttcgttatcggacaaggttgcacgagaccttactcgcgacaatttgaaattaaaagataaaaatggcgacggcaaactaacagtttcatataaatttttagaccagggcgcaggtgagttcagccaggccagaaagaaagcgttcaagagcgccatcaaggcttgggaagacgtggtcaaagtcaagttcaccgaaaacgccaaggaggctgatgcgttttttgtacttcatgccaatccgggcgttggtggatatgccgtcatgccaaatgaccaaggaactgcaagcattggcatcggcgtcggcgataagaactcgcccctgcactctgccatgatccatgagcttggtcatagtttgggattagaccatccaaccggagattacccagaaaacaaccatactcatactgccatgagttacagtaacaaatggtggctacccacagacaatcctaggcttcgtatttcggactataacttgactccagcaatgcacgacatcgcaggcattcatcgcttatacgaacccaattatgaaacccgaaaagataatacaacctacggctttaactccaacactgagcgcgatcattatacgttgacctccgccgacgacctgaccaacttttgtgtctgggacaacggcggcgaagacacgttggacttttccggcttcaagcagaaccaaaagataaacctggccgccgagacactctcggatgtgggcggccgcgtgggcaacgtgtccatcgccaagggcgttgtgatggagaacgccatcggtggctcagggcatgacgtactgatcggcaatcacgtcaataacagactaaccggcggagccggtcgcgacacactgataggcggcggtggtgctgatacctttgtttataacaaagccagcgactccacccctgggaatccggacatacttgaagactttaccagcggcgtcgacaagatcgacctgtccagggtgctcaacgacgccggcattgaaaagccggagctggttagcgtactcaccggtcgcaaaggcgagctgacgctcagctacgatgaaaatgccaagatgcacaaactggttctgaatgtgagcggcaaacccgactctgcactactgattctgagcaaaggacctatagcgctggacgacatcctgacccacgcggattcaaagcccgagcctgggcccgagccagaacctgagccagcccccaaacccaggcctgaaccagaaccgaagcccaggcccaagcgtgaacccaagcccaagccagaaccagagcccaggcccaccccagtatcatgcccccgacccgacacgcgcgacacggtctatggtttcaatgcaaataccggacgccccagtacaaccctcacctctgcctgcgacaaaccttatttcagcgtggacgacagaaaaggcaacgacaccgtggacttctctggtttctatcaagaccaacagattgatctgacacccggtactcgctccagcgtaggtgggctacgcgacaatgtgtttattacgcaaacaaccgtcatcgaaaacgccataggtggcaagggtaacgaccgtatcagcggaaatagcgccgataacatcctgatcggtggtgcaggcgcggaccatctgaccggcaatggaggctttaataccttcagctaccattttgcctgcgattctccacgcaacaacgcggacaccctcttggacttcaccacgggcaaagacaagattgatttgagaaaaatgagcgaaaatgcccaagtcaaactcaactatgtcaaccagtaccgcaaccagcccggcgacacgatcatcgtgcacaacccgttcaccggcaggtacttcctgggcgttgacctgacgggcgatggcaagaccgattttctgatcaagagtacccgccccatcagcaacgaagacgtgatcggactgaacatccaggatgacggttacctgtaagggtgctcacaggctaaacagcctcaacgcaacgccctgcgtagcactttaccgacggtggtcttgggcaattccgtggtgcgaaactcaacatatttaggcagcttgtaccccgtcaggtactcccggcagtgcgcaagaatctgctcctgagtcaggtgcgggtccttgcgcacgacgatgatcttgaccttctccccagtcaccgcatcttccaccccaatggccgccacttcggcaatcccagggtgcatcgccaccacgtcctcgatttcattggggtacacattgaaacccgagaccagaatcatgtccttctttcgatccaccaggcggatatacccacgtgcgtccatcacgccgatatccccggtcgacagccagccctcggcgtccagcacctcggcggtttcttttggccgttgccagtagccctgcatcacttgcgggccgcgaacttgcaactcgccctgctcaccaatgtccgccagtacgccgtcttcgcgtacgaagcgcacccaggtcgagggcaacggcacgccaatgctgccggtgaattccatctcacgcatgcgtgaaatatcaatggggctgatgctcaccacgggcgagcactcggtcagcccgtagccttcgatgatcggcagcccggtgacttccttccagcgcttggccaccgcggtgtgggtggccatgccgccagcaatcaccaggcgcaggtcggaaaagtcccgtgcacagaactccttgttttccagcaagccgttgaacaacgtgttcaccccggcaatgccattgaagcgctccttgcgcaggatcatctgcacacgcttcacgtcccgggggttggcgatgaggatattgcgtccgcccaggcacatgaacatcaggcagttcaccgtcagggaaaagatgtggtacagcggcagcaaggtcacattggtttcctgcttgtgcaggtttaactggtcaccgacccaggccttggcttgcagcaggttggcaatgatgttgcggtggctgagcattacgcccttggcatcgccggtggtgccaccggtgtattgcaggaaggccagttcatcgcggtgcaggctgaccggtaaatggtgcatggccctgccctgtttgagcacctggttgaagcgcagcgcgccgggcagcctgaaggccggtacctgcttctgcacgctgcgcaggatgaagttcattgccgcgcccttgaaggtgcccagcaagtcgccaatggccgcgaccaccacacgcttgacgctgctgccgaccatggctttttccagggtatgcgcgaaattttcgaaaatcaccacggtttcggcgccactgtccttgagcaggtgcttgagctcgtgggcggtatacaacgggttgacgttgaccaccaccgccccggccaggatcgtgcccagcaggcagatcgggtactgcaagcagttgggcatcatcagggccacgcgatcgcccttcttcacgccctggtcctgcagccaggcggcaaaggcaatgccctgagtgcgccaatcggcgtaggtcatttcggtgccgatgctgacataggccacccgctcacgaaatttttccaggtgctccaggaacacttcgcgcagcgacgggtagtcctcgatcccagcatcaatgtccgctggcacgcctggcaagtaagtgttcaaccagatgcgttcggtgtgttccaggctgatagcgttcatggcagtgtccttattgttgtttttgatagcgctacttttcgacgatggcggtgatgcccaacccacctgccgcacagatcgagatcagaccacgaccgccaccgcgttcgtggatggccttggccagcgccgccaattgccggccaccggtggccgcaaagggatggccgcagcccagtgagccgccgttgacgttcatcttggcgcggtcgatgctgcccagagggacatcaaggccgagtcgttcgcggcaatattgcgggtcttcccacgccttgagcgtgcacagcacctgggcggcaaacgcttcgtggatctcgaagaaatcgaagtcggcaaaactcaagccttcacgcgcaagcatgcgcggcacggcgtaagccggtgccatcagcaggccctcggtgccgtcgacaaaactcaccgcagccgtttcgccggtgcgcaagtaggccaacaccggccagccattggcggcggcccattcttcactggcgagcagcactaccgaggcgccatcggtcagcggggttgagttgccagcggtgagcgtgccgttctggcggtcgaaggccggcgacaagcctgcgagcttttccagactgatatcggcgcgcaggttgttgtcccgagccaagccgcgataggggctgatcaggtcgtcgaagaagccgcgttcataagccgcatccaggcgctggtggctggtgagggtcagttcgtcctgggccaggcgtttgatctgccagcgcttggccatttcttcgcagtgctcgcccatggacagcccggtgcgcggctcgccattgcgcggcagcagtggcttgaacagcatcgatgggcgtactttcagcaacgccttgagcttgtcacccatgcttttggcgcgattggccgcaagcaaggtatggcgcaaggattcgttgatgccaatgggcgcgtcggacgtggtgtcggcgccaccggcgatgcccacttcaatctggcctagggcaattttattcgccaccagcaacgcagcttcaagcccggtgccacaggcttgttgcacatcataggcaggggtttgcggggacaacgtggtggacaacagcgcctcgcgagccaggttgaaatcccgcgagtgcttgatcaccgccccggcggcaaactcgcccaggcgttggccgtgcaggttgtagcgctccaccaacccttgcagggcggcgaccaacagatcctggttactgtcgtgggcatacaccgtgttggagcgcgcaaatggaatacggttgccgccgataatcgccacgcggcgggtcggggctggggtaaaactgtagtcactcattgctggctctctttgcaaatgaatagcccgcgcatatggggcttgtccccggcgaaattgcgcacttcgaactcgcgccgtgggccgctcacggggtggccccacagggcaacctggccgggcaggaagatcggcaatttgaagtcgcaatgggcctcggcctggtccagcccgccgggtggctgttgcgctgccaatgcgcggcccagggtccacatgccatgagcgatggcgcgacgaaagccgaagagtttggcaccgatgattgaggtgtgaatggggttgaaatcccccgagaccttggcaaagcgtcgccccaggtcggcgggcagcacccagcgttgggtgcgtaacaggtcgtgttcctgcaacggcagcgggtcgctccagggttcacccaccgggttgctgacatcacggcgcaaatacaggctgtcgctttcccacaccagggtttccctgctgtaggcgcgggtggcgatgctcagcgcctgccccttcggatgggccacccagcgctcgcaatacacctccaggcgcagcgcctggccctcgtgcaggcgctggtgctgacgaatgcgattggccaggtgcaccatgccactggccgggtacggaaagctcggccgagtcagcaacaggaggtgcagggggaacgccagcacatggggataggacaatggcacgccctgctcgcgacgaaagccacacgcccgtgcgtatgcggcgataccgggcggcgaaagttccaccgcgctgcgtaccaggcgcgctgtgggcaatggcggcgcaccgtcgggcttgggtttgcgcaaggcgcgcaggccgtcgagcaacaactgcgtgcgcgatggcggtgggtcgataatctgcgtcacgtagtccatcggtcaggctcccaacaggctttggccgcacacccgcaccacctggccattaaccccgcccgacgccggatgggccagccaggcaatggtctcggccacgtcgatgggttgcccgccctgggacaacgaattcatgcgccgccccgcttcgcggatcatcagcgggatcttcgcggtcatctgggtctcgataaagccgggggccaccgcgttcaccgtgacctgccgggctgccgcacgcggtgccaggccctgtaccaggccgatcaccccggccttggacgtggcgtagttgctctgccccaggttgccggctatgccggaaatcgacgacacgcacacaatgcgcccgccggggttcaagccctggctgtcgaggagggcctcactgagctgcaacggggcttcgagattgaccgccaggacactgcgccaggcgacctcggtcattttggcgatggtcttgtcgcgggtgatcccggcgttgtgcaccaccacatcaaaagcgccatattggctgacatgggtttgcaacagcgcggcggtgtcagcggcggtgatatccaggggcagcgccgaaccgcccacgctggtcgccgcctgctgcagggcttgctgcgcctggggcacgtccacgcacaccacatgggcaccgtcgcgcgccagcacctgggcaatcgccaggcctatgccacgggaggcgccggtgaccagggcacgtttgccggcaaagggtttgtcccagttgatggcggcatggccatcgaccggtttttccaggcgcaccacctgccccgagacataggcggaacggcgcgacaggaaaaaccctaggctgctgtccagcgcgtcttccgcacccggcgccacgtacagcaattgcacggtgatcgcgcggcgcagctccttggccagcgaacgcaccaatccttcaagagcgcgttgggcgatggcctggggcaagtcgtggcaatgttcgggcgcggtgccgagcaccaccacccggccatgctggccgaggcgcttggcattgctgtgaaagaacaggtagagctcgtccaactgttgcaggtcggtcacgccgctggcgtcgaacaccgcgccttgcaccttgaccgtggacggtgccttgagcgtcgccggggtcgcggcgacggtgtcggtggcgctgaagatgcgctgcaccgaagccagcaggcgccctgccccggcgatgatcacagggttagccaggccggcctggccgctgcgatgccgttgcagcgccaagggttgcggcaagccaacggcctgggccaggcgccggccccagggggaattgacgaacgaaaggtagctgtcactcatggtaagcactcactcacaacacatacgtgccttgtaaacccgatcgaatgtgggagctggcttgcctgcgatgcagacgactcggtgtgtcagtcaaaccgaggtgatgccatcgcaggcaagccagctcccacaggtggaccgggttttctcttagttgaccgggacgctgcgccgtttggccaccggctcgagtgcctgcttacgctgctgcagagcctccagcaaaccaaagtcctggggaaagtcatccacctggataccgtggtcggcgtattccacatagcgcgccagcaaggcgtcttcgtcatcgctgatcaagtccagcgcccgcgccttcacgcgccagtcggtgaaggccgtggcagaaatcggcagcgggccgagcaaaccttgcttgatggcgggtttgagccgcgcctcgatcaactccacttggggcaacaaacggaaccccagttcgccatacgccagcttgtcgatttccggacgcgggatgtaggaattggccagcaaccggtcgcgggtctcgccaggggtctgcaccacctgcgccacctgcgccaacagacggtccgatggtttgcgcagcgggatgccaaacggaaaactcaaggtgcgcaccaccgccgcagcgggttttgaggggtagttgtcgagcacttcggccaaggcttcatgggcgcgcagcaacgcgtcctgggccgcccagtgcaccagcggcaagtccgcctggggcctgccgtcatcctcgaagcgcttgagcacgcaagacaggatgtacagctgcgacaggatatcccccaggcgcccggtgatactttccttgcgcttgagggcgccgcccagcacgcccatggaaatatccgagatcagcgccagcaccaccgacagccgattggcctggcggtagtaggccgccagcgccgggtcggtcttggccggcgccgaaatcaggcgcccgccggtcagagcatgcaccgctgcgcgtacggcgttggccacgacaaaactcacatggccgaacatcgcgctgtcgaagtcttccagagccttgcgccggtcggggttgtgcgccgcttccatctcgcggaacacgtagggatggcaacgaatcaagccctggccaaagatgatcaggcagcgggtcatgatgttcgcaccctccaccgtaatggcgatggggctttgctggtaggcacgggcgaggaagttattggggcccatgcagatgcctttgccggcgacgatgtccatgccatcgttgacgatgatgcgcgcacgctcggtgacgtggtacttggcgatggccgagatcaccgacggtttctcgccggcgtccagggacgccaccgacaccttgcgcaccgcatcacacgcatatagatgcccggccatgcgcgccaacggcgcctgtacaccttcgaacttgccgatgggcaggccgaattgcttgcgcatcgccgcataggcggtggtaccgcgcaccgccactttacccaggccgacgttggccgaaggcagggaaattgcccgacctgccgccagacattccatcaacatgcgccagccgttgccgatttggtcgcggccaccgatcacccactccaagggaatgaacacatccttgccggtggttgggccgttctggaataccgcattcaacggccagtgacgccggccgctgttcacgcccgggtgggacgtggggatcaacgcacaggtaatgcccagggaacctggcgcgccaagcaagccctgcgggtcttcggcgcggaacgccaggcccagcaccgtggcaatcgggccgagggtgatatagcgcttgtcccaggtcactttgaaacccagtacttcctcgccctcatgcatacctttgcagacaatgcccaggtcagggatcgcgccggcatcggagccggcatacgggctggtcaaggcgaaacaggggatgtcgtcaccgcgtgccaggcgcggcagatagtaattgcgctgggcgtcggtgccgtaatgcagcagcagttcggccgggcccagggagttggggaccatcaccgaaatcgctgccgccgagcagcgtgtcgacagcttcatcaccacttgggaatgggcgtagtgggagaagcctttgccgccgtactgcttgggaatgatcatgccgaggaacccggcatccttggtgtactgccagccctcgggggacatgtcctgccagacctgcgtggtttcccagtcgttggcgatatcgcacagggtttcgacttcgttgtcgaggaaggcttgctcctcggggctcaggctggccggcgcggcttgcagcagacgctgccagttgggtttgccgctgaacagctcggcgtcccaccacaccgtgccggactcgatggccgcacgctcggtatcggacatcgccggcatgattgtacgaaacaggcccaaggccctggtggtcagcagcttgcggcgcaggggtttgattgccagcaccaaggcgggcagcgccaccagcaaagccgcgacagtaaggcccaggccggccaccgcgttgaacaggtaaccaaccgccagccagacgatgccggcgctgagccacagggcggcggcggcttgtcggtaagccagggcaatcgctgctgcgatacccaccaataaccagataagcatgggggagacctctacttgattcagggtgtggcaaacgcgtgggcagctcgacatgagctgcggctgaaaaccacactacaaacttcaaagagcaaattcaaattttgttttgaaatttttatttaatcgttaaaccaaaaaaaacacggctgaatgcctcaaccggtcatcaccgacatagaccaccgccctgtagaaagacgcagctcggaggaaggctgcaagatgcgcttgccgccctccgccatcgccctcaggccccgtcagaacgcataggtcgctgacaaactgaccacatcacccgaagactcggccttgccatccaggcttgcgccgcccagtcggtcgatgtttttggtcttgagattgaccttctgcacgaactgatgggaataggccacatccaggctcaagcccttgaccgccttcacatcgtagccagcccccagcgaaaggaacgtacgatcgccatcggggatgcgtggatcgcgggtggagttacgtgtaggcgtctggtcgatagccacgccggcacgcaaggtcagttcatcggtcgcacggtagtcaccgccgagggagtacatccaggtgtttttgtagttgtagggaatggagacaatgcgcatatcgccggagtcgagggtcaagtccttgaacgacgaccattcggtccacgtgacgctggcacccagggtcaggcgatcgttgaactgatgcacccaatccaggcccgcagtggcaggaatatccagttgaaccttggcatgcgcaccgttgggggccaattccaggccaggataggcggtgttgaccaacgtaccggtgcccccgaatgggctgggctgagtcatgaggttgtaggaaaactgatcggcgtacaggttgtacttacccgtcatcttgtttttgatcttggcgtggtaattcaggcccagggtgtcgcgctcggtgggtttccacaccacgccggcaaaccagccagtggaaatattgtcgaccttgacccgcatcagcgcatggcccacgtctgaggggaagttgatcccgccaagctcggagtcagacactgccgcagcggacaacaggtcgacgttctggctgacgaagcccttgctgtgctgcacgatcatgccgccgcccacggagaactggtcgttgactttaaacgacagcgagcccgtcaacccgacggtttcgattttggtatccacggcaaagtcgcgcagtttggagtcttcattccaggtggagcgcatgccctgtggcaccacttggctcaagccgaaggcaaaccggtcgcccaagggcatcaccatgaagccggtgggcagccaggccgtgaagccgccctggccaccgtcgttgttattgacagcggttgctgcgccatcgggaaaaccattctcgtccaacggcgtactggaaatcgggttgccggcgtaatccgaggcactgcccttgtacttgatcttgatgcgcgcatagtcgaccgtgaattgcgcaacattgtgttcgacaaacgccatggcggccgggttgttataagccgagctcgggtcgttcttgaacaacgagccgccggcaaatgccctgccccaaccaggtgcgccgtaggtcggggtagaaaaaccgccagcctgtgcaggcgcgatgaaggcggttacccctcccatcaacgccagccccagcaaaacctgcacgtgttgtttcttattattcatgcggcactcctttttgttatccctgtgaaccggcctcgcccgttcgtcttgctgcccggcactgcctgaactggcgcctggaaaaggcgccagtctttcagcaggtgatcaacccagtgttccgaccggccatcaaggcacgatggtgaaggttgggcttggggtcacgctcaagctcaccacggtgcagctgccgctgagcccttggttggccgccgtcagcaccccaccgctgtagcccacggtgatggtcgatgggccacagttagaggctgggtacaggacagaagaggcgatggtatagccgacattggcgaccgaacctgccgctgggccggtggcggtcaatgtccatggcaacccggtgatttttggcaatgcgcaaaggccgctaccgctcaccgtcaccccggtgatcttggccacgccagtggcgtcgacgttgccggtaaagttggcagtgcagttaacggtggcctgataggacgacggtgatttcaccgaaatagtgccaggcgccgtaaagttcgaattaaccggcgtgatgctgtaggcattggccatggaagcagcccccatgcaaacagccaaggcagagagcgacacgagagttttcaagcttttcattgtttttcctcacatgttatggcgattcatttcgccaggggtaatggccatgatcgagaggtcacggtgaaactgcagaacttccctttccagccaaatttcaatgcatttaccgctacaaccgttggaacgcgttattcgacaactttgaagttgggtggcatcttgatcgacaccgtcttgatcttgcagtcttcgccaatcgccacatcgctggcttccaacttgccggtggcgttatcccaagtaccgtcggccgtcgacggcccacacttgccacccaggccaaaggcatgcacgtccacgctgatcttcgacatggagccgctttttgtatctttggcgattaacacccaaggcaagttgatggcttcgacacggctgcacttgaggccaccgtcgaactcgactttgtcgacattcaccgatgaaccatcggctgcaaccttgccggccaccttgatggtgcaatcggcactgatgagcttgcctttggaaaagctgataggcccctgggcagtgaaggcactgcccgcgggttcgatacgcgcagcctgggcctggtgatacacaatcaggcccatggccgccaagaagatgtgggcggtgaacttggcagaactttgcatggtgtacgtccttcccttgaaattattgttgtagggtcaaaccaggtgcttgcactcaatactccgggcgatcagaacctgcgcgatacacagatcccgagtacaccctgaaggcttacttcatctcaaaacggcttggcactaccgctgtacttttccaggtacttcaagcgttttgacggttgaagattggtcagattgatatcaccgccatagtgattcagtacgcgatggtccatgcgacgccgccacaaatacggcacataagcccagacaatcatgctggcatagccatacggaagttgcggtgattcatcaaagtgacgcagcgactgataactacgcgtggggttggcatggtgatcggagtgccgttgcaactggaacagaaagatattggtgacaatccgattactgttccacgagtgacgcggcgagcatcgttcataacggccattgggcaacttctgacgcttgaggccgtaatgctcgacatagttcaccacttccagcaacgagaacccgtagatgccctggataatcaggaacggaattaccgccgcccccagccaggcaatcattgcgccccacaacaccacgctgtacatccaggcgctgagcaccgcgttcttccagtgcagggccggcaggccgagtttgcgcaggcgttcgcgctccaggttccaggccgacacggcgctgaaccacaccgaacgcggcaggaaagcccagaaactttcacccaggcgcgagctggccggatcttccggagtggcgacccggacgtgatggccacggttatgttcggtatagaagtgcccatagaaggtcggagccaaggtgaccttggccaggaacacttccaggggcttgggtttgtgccccagctcatgggcggtgttgatggcaatgccggtggcggcaccggtggacatggccatgcccacataggtcaaccagctgatttcaccgtgaagttcagtgcgtgcggtgatgaacgcggcggtcctggccagccagttcgacggttccagggtggccgtggcctgcaacaggccgccgttgatgatccagtcgataccgcccgcagcgagccaaccggtgatgaccaccgaggcaatcacaaacagcacgccggtgtagacgatccagcggtagtagcgttgggattcaaggtggctgaccgcagattcgggcgggttgctgacgtcttcgccaagcaggccgtcaatcagcgggatcaagccgaagatcaccagcacgcccacccaccacagttgttgcacgcctgtggtgatggcaagggcgccggagagtaagggagtcgccagcggcataatgccgagccaccacaggtggcgtttgccgtcggcccacacggtcgcagctgccagcgtctggttcatggcagcctccgaacacagtcggtaggcgatgcggcagcggtgcgctgactgctgcgagaaatcatgcatgcgataaaaggcgtttttttcattattttattcgctcttaggcatttcaaaaataatttcaaattacacattgaaatatttttttaaataaatagcgcggaatcgttaggtcgtcaactagtttctccagcccttttttccgtgaccgagcagtctcttttcagccattgggtcaggtactcagggcaggcatcaacgctaatgaaccgcagtcgagtggcaccgttatttgctcgccaaggctacagatggctgtaactgcctaacgttttcaccgggtcgaacccgcttggccacctgctccaccagcgccgccacgcgctcggtggcggtgatcggcaacatatgcccgcggccttcgatcacctgcattttcagccctggcaccttgctggccagggcctggccgtgtttctggaagtcgagcaccttgtcttgcccgccgtagatcaggccgattggcagcgtcagttgggagtagcgcttgaccatctctggcaggtggtcgttgacccggttgatctcggtggacgcggcgtagaagttgtcggggcgcatgcccagcaaaccgccgccacggctggcgaagtctggcggcgcagggtccggggcgaacacgcccttcaccaccgagtctttggtcagcaggccgatgggcagggtcaaggtgtgggccacccagcgccgcagccaggccgggcgcacggccagagacaggaacaccagcggcagcatgcgttgggggtgagtcaagggcgcaaccagcaccaacccggacaccgcatgcggatggtcgagggccagcgccagggcaatcgcgccgcccagggagtgccccagcaccagcggtttgtccagatccagcgtcttgatgaaagccgcgatttgtcgcgcctgggcaggcaagtctgccggcgtgccgctatgccgggtggaatagcctgagcccggccggtcgaggctgatgacccgaaagtgctcacgcaactggccggacaaggcataggtcaggttgcgactgctgcccatcagcccgtggatcatcaccagaggcgggcccttgccctcttcgacataatgaaagcgctcgccatccacctcgacgaagcgcccgttgatcggcacggtcgcttcaatgcgccgcgtcatccaggcactcaagccccataacaccgcgctggcgcccaccagcacacccgcagcgacaacccactccacagccatagctcggtcctctgcttccctgctgctggcgacccgaccggaattggcctggcctcagccatcgtccacaccctggacctaaacttcatgcataccacgttcgtccgtcggacaaatcgttcatgcgcaacaaggccctagcgtaggcgaatttttcaggtagattatttaaaatcttttttaaaataattaattcaattttcctttgcaatggtgttctatctaaaagacaaaacaaaaacaggagcacatccgatgcccaagcgctttattgacgaggcagccctatgaatgcccccagtgactcaatcgacatcgccatcattggctccgggttcgcgggcctgtgcatggcgatcaaactcaaggaggccgggctcaccgacttctttatcgccgaacaggccgagacactcggcggtacgtggcgcgacaaccactacccagggtgcgcctgcgacgtgcagtcccacgtgtattcgttttccttcgcgcccaacccgaactggacgcgacagttcgcggcgcaacccgagattcgtgcctatctggaagactgcgccaggcgctttgagctggcgccctacctgcgctttggcatgggcctgcaacgtgcgctgtttgatgaacagcagcagcgctggcagctgaccttcagcgacggtcgccaggtcagcgcacgggtgctggtgtcaggcatggggggcttgtcgcgcccggcaatgccggacatcccagggctggacagcttcaagggcaagcgcttccactcccagcagtgggaccatgagtattccttgaagggcaagcgcgtggcggtgattggcaccggcgccagcgccatccagttcgtgccgcagatcgccccgcaggtggcgcacctggacctgttccagcgcacaccgccgtggatcatgcccaaacctgatcggccgatttccgctgccgaacgctggttgttcaagcatgtaccgcttacccaaaagctggttcgtggtgcgctttactgggcactggaaggccgcgtggtgggctttgccctgcacccacgcctgatgaaaatggtgcagaaaatcgccctgcgtcacctgcgcaaacaagtggcccgcccttccctgcgcaaaaccctgacgccggactacaccatcggctgcaagcgcgtgttgatctccaacgattactacccggcgctctcgcgcagcaatgtcgaggtggtcaccgacagcgtgctgcgcatcgaagccgacggcgtgatcaccgccgacggtatcaagcaccccgccgattgcctgatcttcggcacaggtttccaggccagcgacccgttgccccgtggctgcatcatcggccgggacggcatcgacctgatggacgcctggcgcgatggcgcccatgcctataaaggcaccaccgtgccgggctacccgaacctgtttctgatcgtcggccccaacaccggcctggggcataactcgatgatcctgatgatcgaggcccaggtcgcgtacatcctcgacgccctgaaacacatgcagcgccagcgccttaccacggtagaggtcaagcccgccgtggagcacgcctacaaccagcagttgcaggacaagctcaagcgcaccatctggaacaccggcggctgccagagctggtacctcgacccacgcaccggcaagaacaccacgctgtggcccggctcgacctggcgcttcaagcaggtcacccggcattttgccctcaaagactacagcgtcagccaggcgccggcgcccgccctgccgcgcgcggttgcaacgccccactccaccacagaaggcagcctgtcatgaagtcattcaacggccgcgttgcggcgatcaccggcgcggcttccggcatgggccgctcattggccctggccctggcgcgggaagggtgtcacttggcgctggcagacaaaaacagccagggcctggaacagaccctggcgctgatccgcacctcgaccttgtcgcccgtcactgtcaccacccaagtgctggacgtgtccgaccgccaggccatgcacgattgggcagcacgctgcgcggccgagcacggccaggtcaacctggtgttcaacaatgccggggtggcgctgtcgagcaccgtcgaaggggtggattacgccgacctggaatggattgtcggcatcaacttctggggagtgttgcatggcaccaaggcgttcctgccgtacctcaaggccagcggtgccgggcatatcatcaatacgtccagcgtgttcggcctgttcgcccaacccggcatgagcggctacaacgccaccaagttcgcggtgcgcggtttcaccgaagccttgcgccaggaactcgacctgcaacgctgcggcgtgtcggccacctgtgtacaccccggtggcattcgtaccgacatctgccgcagcagccgcatcgacgcgaacatgaccggttttctcatccacagcgagcagcaagcccgcgccgatttcgaaaaactcttcatcaccgacgccgaccaggccgccaaagtgatcctgcaaggcgtacgcaaaaacaagcgccgcgtgctgattggccgcgatgcgtattttctcgacctgctcgcccgttgcctgccggcggcctatcaggcgctggtggtgtttgccagcaagcgcatggcgcccaagccgcgcacgccagtgtttgaaaccaacgacgagcctcgactctgaacaggaggacgcaccatgttgccgatccgtcgcgatatccgttttgccttgcctgccgagcgcatcaagaactggcacgaacaagggccggtggtcagccatttcttcaatgccctgtcgttgctgtttccccagggcgagctgttcttcatggacagcgtgcgccactaccgnnnnnnnnnnnnnnnnnnnnnnnnnnnnnnnnnnnnnnnntgtaacagtaacgccaccaacgcgctccagcctgtctggtgtgaagcccccaaccctcgccctgtctccccatgaaaatattcatggaacaacaccaggtcacgactggccgggtcctcctgcaattgcgcataccccgccatcgatggccgcacaccgttctcatccctgagaaacaaccgcgtcagccgcccgctgaggctgtcagccacctcctccaatgacgccagatacccactgcccgtcgggtactccacggaaaaatgctccgcgtaatagcgatgaaactcgcgcaacgattcaatcagcatgtaattcaccggcatccacagcggcccgcgccaattggagttgccgccgtacaagcgtgagtcggattcacccggctggtagcgcgcgcacaaggtgtcgccattcatcttcagcgccaggggctgctcggcgaacgccttggacagggcgcgcacgccaaaggccgacaagaactcctggtcatcgagcatgcgccgcagcaaatccttggtgcgttcaccgcgcagcagcgccagcaacaggcggttgccctgccccggctcggtccagcgcgaaaccagcctggccaggtccggccgatgatgcataaaacccagcaggcgctcgcgcaagccttccaggccttcgtgctcgcgctgttccagcaccagcaccgcgaacagcggcattaacccgacgatggagcgcaggcgcaccggttcgctctggccatcagggcggtgcagcacgtcgtagaaaaactggtcctgctcatcccacaaaccttcggcgctgtcatcgacgcggttgatggcgccggcgatgtagaggaaatgctcgaaaaacttcacggcaatgtccacgtacaccacattacgcttggccaactccaggccgatgcgcatcaggtccagggcataagccgccacccaggcggtgccgtcggcctggtccaactggtagcccggcggcaacggggccgagcggtcgaacaaggcgatattgtccaggcccagaaaaccgccctggaacaggttgcggccctcggcatccttgcggttgacccaccaagagaaattcaacagcagcttgtgaaagatccgctccaggaaatccatgtcgcccacgccggtcagcgccttgtcctgctgatacacgcgccagctggcccaggcatgcacgggcgggttggcgtcgtcaaagcgccattcgtaggccggcaattggccgttggggtgcatgaagcgatcctttaccagcaacaacagctgttgcttggcgtaaccagggtcgatcagcgcgatggccaccgcctggaagccttggtcccaggaggcgtaccaggggtattcccaggtgtcgggcatggacaggatgtcgaagttggacagatgccgccaatgggtattgcggatgtgcaagcgctcgggcggtggcgcaggctgggccgggtcaccgtcgagccactggttcacgtcaaaatagtacaactgcttggaccacagcaggccggccagggcctggcgctgcacagtgcgcgcatcttcatcagcgatgccctgttgcaagaccgcgtagaagtcatcggcctcctggcggcgctgttcgaatagcttgcgtgcattgacgcctggcgcgtccagaggcgcaaagcgcaggtagagggttttgctttcctggcccgccagttcaagggtgaaatgcgcggccactttagtgcccgcgtcccggcgaatcgccgactcgaccccgcccaccacataatcgttaatgccatccttgaacggccccggcgccggttgcccgtccagtttgggctggttggtttcgttttcacagaacagccactgcacgccgtcctggccccaggcactgaggcagcggtcatcaagttcatgatgacgggccagcacccgatcaacgtccagcctcaagctgggcttgggtgcatcgaaggtccagctccagtcattgcgcgcccagagctggggcagcacctgcaggcgtgtgggttggtccgaacggttctgcacggtgacgcgcatgaaaatatcgtcgggctgatgcttgacgtattcgacactgacgtcgcagtagtggttgtctgcaaacacaccggtatcaaggatttcatactcggcatcatccagcccacgacgggcgttttcggcgatcaggtcggcgtacggaaaggccgcatgggggtatttgtagagcatgcgcatgtaggcatggctcggtacgccatcgacgaaaaagtacagctccttgacgtcttcaccgtggttgccttcggcgttgttgaggccgaaaagacgctccttgaggattgcatcgcgctcgttccacagcgccaggcccaggcaccagcgttgggccttgtcactgaaaccggccaacccgtcctcgccccagcgataggcgcggctgcgagcgtgttcatgagggaagtaggcccaggcgtcaccgtcggcgctgtagtcttcgcgcaccgtgccccactggcgttcactcaggtacggcccccactcgcgccaacgttcggcgtgttgcgttgccaggcgctggccttcaagggtgcccagcaggttggttgcgggtttggccgtcatcgggtcctccttcacctacacagtgaggcgcagtgtagagcgcaagacctccgcgtgcacatgaagacttggacgcagggccaactcattcatttgcagaatgaagtccagaggaatcttcgtttgcaagccggccggccgctcaacaaaatcgggcaaaggccacgatcatcgctccagtcatcaggaatttttctatgcacgccaccgcccatgtcagccccgacgagatccgcaagggcttttccaaggccatgtccgacatgtatcgagatgaagtgcccttgtatggcgcgctgctggagctggtggcccagaccaatgcccgcgtgctcgacagcgaaccaggtctggcgcatcaactgcaacgtaccggcgaaatccagcgcctggacatggaacgccacggcgccatccgcctgggcaccgctgcggaactggcaaccatcagccgcttattcgcggtgatgggcatgcaaccggtggggtactacgacctcacccccgccggcgtgcccgtgcactccaccgcctttcgcgccgtgcatgaacacgcgctgcaaaccagcccgtttcgcgtgttcacctccttgctgcgcctggaactgatcgaaaaccccgacctgcgcgccttcgccgaaaacgccctggccaagcgctcgatcttcaccgccgaagccttggccttgatcgaacaagcacaaacccaaggcggcttgaatgccagcgacgccgaggcctttatccgccaggccctggagacgttccgctggcaccacactgccacggtcaccggcgcccagtaccagcaactcagcgaccagcaccgcctgatcgccgacgtcgtcgccttcaagggcccacacatcaaccacctgacgccacgcaccctggacatcgaccaggtgcaggcggcgatgcccggcaaaggcatcacccccaaagccgtgatcgaaggcccacctcggcgccagtgcccgatcctgctacgccagaccagcttcaaggccttggacgaacccatcgccttcaccgatgcccacggcagccacagcgcgcgcttcggcgaaatcgaacaacgcggcgtcgcgctcacgcccaaaggccgcaccctgtacgaccaactgctgaacgccgcccgcgatgaactcggcaccttccccaatgaagccaacgccgagcgctatgtgcaattgatggcgcagcactttcaagccttccccgataactacccgcacatgcgcgagcaaggcttggcgtatttccgctacttcgcgaccgataaaggcctggcagcacgcggccaggccgaccagccccgcacattggaggggctggtcaacgccggccatgtggaggtggaaccgctggtgtacgaggattttctgccggtcagtgcggcggggatcttccagtcaaacctgggggatggggcgcagagtcactacgcgggcaactccaaccgcgcggcttttgagcaagcgctggggcgcaggacgattgatgagttgcagttgtatgagcagacgcagcagcgctctatggatatatgcgttgaaacgctgttgaaatgactgaacgccaggcgccacggccttgatggtaaccacgatgcgaagcgagtcgctcttgatcttgctctgcttttgatcttgatctcaagcgccccgttaaaccacgctggccgaacgcaggcttgaattcgtgggtaacccggcaggacgccgggttagccgccccgcgccatggatggcgcgtggcggcggcccacggattcaagcctgcgttcgggcacaccgagcccaggcgaggtgccgagtggtggggcaagagcgttttgcttacttttgtctgggccggcattccggcttttcaaaagtaagacgccatcagggcggaaccctaagcggccgttaccgcagcaatggatatgtacacaatccaactgtgtcgcctgccaggccgccttcgcgagcaagcccgctcccacatttggactgcggcgcgtcaggtagataagtgtcggctgccaggccgtcatcgcaggcaagccagctcccacaggcagcatttgcagccgaccgattcagccccgtgttgcatgaattctgaggatgcccacccggctcaacaacgcaatccttgcgccgcaacaagccccagagccgagtggacggggcgcatcataaggagtgaaagggcatttgtcctccagacaattctgaacaaatatgcacattccaaatatgtggcgagggatcgcttaacccagccgccccacaatttcgtctttgaccaatagccgtttcttcttcagcttttccacctcctcatcgctggcactggctttttccgccgccagcacctccccgtcggcagcatcatattgggtgagcaacgaatccaaccgtttgtcctgcgccctgcgttcgtgaacaacttccttgctcaaccccaagtcctgatacaggtcgtgtttcactggcatggcgtacctccacagattgatcgatggtctacgcccttgaagctagcccattccaaccggtcttgtcatgtttgagatcaatcgcatcccgttcgtcgcggcgcatgcgatgggatcaaacctttgccccaccctgccctcaactgtagatcgccaccccagggagaacggttttatgaatcacgttgccaccgctgccgacacccaatgcatcaacaccctacgcaccctggccatggatgccgtgcagaaggccaactcgggtcatccgggaacgcccatgggcctggccccggtgggttatacgttgtggagtcgcttcctgcgttatcaccccgagcatcccgactggcccaaccgtgaccgttttgtattgtcggtggggcatgcctcgatgctgctgtattcgctgttgcacctggccggtgtggtggagatcgatgcccatggccagcgctcaggccagccggccgtcagcctggacgatatcaagcagttccggcagatcggctccaagaccccaggccatcccgagtaccgcatgaccaccggcgtggaaaccaccaccggcccgttgggccagggctgcgccaacagcgtgggcatggccatggccgagcgctggctgggccaacgcttcaaccgcgacggccaggtgctgtttgactacgacgtctacaccctgtgcggtgacggcgacatgatggaaggcatcagcagcgaagccgcgtccctggccgggcatttgaagctcgataacctgtgctggatctacgacaacaacaccatcagcatcgagggccacactgagctggcgttcagtgaagacgtgatccaacgcttccgggcctatggctggcacaccgtgcatgtcaccgatgccaatgacttgcaggctttgagcgtggcattggaaacgttcaaggccaacaccggcgcccccaccttgatcgtggtggacagcgtgatcggctacggctcaccgcacaaacacaacaccgctgcggcccatggcgagccactgggcgaggacgaaattcgcctgaccaaggccgcctatggctggccacaggattcaagttttctcgtgcccgaagaggctcgcacagtgttgcgcgatgccctttacgaacgcgccgagccgctgtacgccgagtggaaccagaccctggcggccctcgacccgcaacgggccgatgaactgcaacgcatgcgcgccggggaaatgcccgaacaatggcaagcgcacctgccagactttgccgccgatgccaaaggcgtcgccagccgtgcttcgggcggcaaggtattgaatgccttcgcccaacagattccatggttgctgggcggttcggcggatttgtcgccctcgaccaagaccaacctcaccttcgacggtgccgggcgtttcagcgcgggtgactacagcgggcgcaacctgcacttcggtatccgcgaacacgccatgggcgcaattgccaacggcatggcgctttcctacctgcgcccgtacacctcgaccttcctggtgttcagcgactacatgaaaccgccaatccgcctggcggcgatcatggagttgccggtgatcttcgtgtttacccatgactccatcggcgtcggcgaagatgggccgacacaccaacctatcgaacacctgacccaattgcgtgccaccccggggctgttgaccctgcgcccaggcgatgccaatgaaaccctggaactgtggaaggtggcgctggcacaaacccatcggcccagctgtatggtgttatcgcgccaggcactgccgaccctcgaccgcaaccactatgcccccgcctccggtgcggccaaaggtgcctatgtgttggccggtgcggatcaacctgaggtcatcctgatcgccaccggcagcgaagtcagcctggcggtggccgcgtatgagcagctcaaagaccaaggcattggcgctcgcgtggtgtcgatgcccagttgggagttgtttgaagaccaggatcaagcctaccgcgacagcgtcctgccaccggcggtgaaagcccgcgtagtggtggaacaggcagggcccttaggttgggaccgctacgtcgggcagaccggcgccaaagtggtgatgaacagcttcggcgcctcggcaccgctggccaagttgcaggagaagttcgggtttaccctggagaatgtggtgaagctggccaagcaacagatcttgtaggagcgagcttgctcgcgaagaactcgcaggcgccgcgtttattcaggacgaacgcgttatcgttgacgtttttcgcgagcaagctcgctcctacagttggttattagatcagtgattgggctagataaggtgcagtgcggctgtgtttgctcttggcaaccttttgcggcgtaccgcacgccaccaccttcccccccaagtcccctgcccccgggccgatatcaatcacccaatcactctgggccaccacgcgcatttcgtgctccaccacaaccaccgtatgccctgcctccaccaaatgattcaactggctgagcaaacgatcgacgtccttggggtgtaagccggtggtcggctcgtccaagacatacaaggtggcgccccgggcgttacgttgcagctcggtagcaagcttgatgcgttgggcttcgccgccggacagctcggtagccggctgccccaggcgcagataacccaggccgatatcgcgcagcacgactaacgagcgcaggatgcccggttgctcggcgaacacctgcaccgcctgctccaccgtcagccccagcacctgggcgatgttcaaaccctgccatttgatcgccagggtatcggggttatagcgcgcgccgtgacaggtcgggcatggcgcgtacacgctgggcatgaacagcaactcaacgctgacaaaaccttcaccctcacagttcgggcaacggcccttggcgacattgaaggagaactgcccggcatcgtaattgcgcttcttggccgctggcgtggcggcgaacagtttgcgcacgttgtcgaacagcccggtgtaggtcgccaggttggaacgcggcgtgcggccaatgggtttctggtccacctgcaccaggcgctggatgtgttccagcccggcgctgatacgcccgccactggcttgcggtgcggcatcttccaggctcggctcctcgtcgctttccagcacacgccccagacccgtgcccaccagctccagcagcgcctggctgaccaggctggatttgcccgagccggaaacccccgtcaccgcggtgaaacagcccagcgggaaatccacgttcaaattgttcaggttgtttcgcgtcacgccctccagcttcagccacccggccggttcgcggcttggcgcattggtcgggcgaggttgggcaaacaggtattcgcgggtctgcgaggcttcgatatccgccaaccctgcgggcggcccgctgtacagcacttgcccgccatgctcgccggcagccgggcccacgtcgatcagccagtcggcgcggcgcatggtttccaggtcatgctccaccacaaacagcgaattgcctgcggctttcaaacgatcaagcgcggtgaacaacgcttcgccatccgccgggtgcagacccgccgacggctcatcgagcacataaataaccccgaataactgcgagcccaattgggtggccaggcgcagacgctgcaactcccccgacgacaaggtcggcgtgctgcgctccagggacagatagcccaggcccagttcgatcaaggtgttgacccgttcgagcaggtcctgggcgatgcgttgggctgccaggcgtttttccaccgacagcttcatcctgtcctgccccgccgccaccggccgcagcaagtcggccaattgcgccagagacagttgcgacaactcgccgatatccacccccgcaaacttcactgacagcgccgcctggttcaggcgcttgccctcgcacaacgggcaggcattgccttgcatgaactgcgacacgcgctttttcatcagcgcgctttgggtgtgggcgaaggtgtgcaggatatagcgccgagcgccgctgaaggtgccttggtagctgggttcgagcttgcgtttcaacgcctcgcgggtctgctgcggggtgaagccggcgtacaccggtacggtgggggtttcttcggtgaacaggatccagtcgcgctgctttttcggcagctcgcgccacgggatgtccacgtcatagcccagggtcacgaggatgtcgcgcaggttctggccctgccacgccaacggccaggacgccactgcacgctggcggatggtcaacgacggatcaggcaccatcagcgcttcagtcacttcatacacgcggcccaggccgtggcattgcgggcacgcgccctggggcaggttcggcgagaagtcctcggcgtacaacatggcctgccctttcggataacggccggcgcgggaatagagcatgcggatcaagctcgataaggtggtgacactgcccaccgacgagcgcgcactgggtgtaccgcgttgctgttgcagggccacggcaggcggcaagccttcgatgctgtctacatccggcacgccaacctgatcgatcaggcgccgcgcatagggcgccaccgattcgaaatagcggcgctgggcctcggcgtacaccgtggaaaacgccagggacgatttgccagagccagacacgccggtaaacaccaccagggcgtcccggggaatatccacatcgacattacgcaaattatgttcacgggcgccacgcaccctgacgaagcccgtttgcggggcggtgagcggtgggatgttgcgctgtgatgtcatgggcaaccttgtcttgcgcttagcaccctgcgcacgcgttgggtcagggcatcggggctgtagggtttgctcagcaggtggatatcggcgctgagcagatgattggaagacagaatgtcgcgggtgtggcctgaggtaaacagcaccggcaccggcgggttctgcgcgcgagcccaggtggccagatcggtgctcttgacccgaccgggcatcaccacatcggtgaagatcaggtccggcgacacgccgcgctgcaacacttgcatcgcgcggtcgccatcctcggcaatcagtacggtatagcccgactgctgcagcaactcgaccaccgtcaggcgtacgccttcattgtcctcgaccaccaggatggtttcctggcctccgccttgcaggtccgcatcactgtagtcgtcgaagcattcaggctccaggcagtgggggaaatacatctgcaccaccgagcccttgccctcctcgctccacatgtccacgtgcccgccactttggcgcacaaaaccgaacaccatgctcaggcccaggccggtgccgtggccttcgcgcttggtggtaaaaaagggttcgaatgcgcgcttgagggtcgcctcggacatgcccacgccggtgtcggccactgccaggcgcacgtactcgccgggcttgatgcttttaccgatgcaatcgtccgggttgaggatgacgttttctccggtgatacgaatcacaccctcgccctgcatggcatcgcgggcgttgatcgccaggttgagcagcgcgttttccagctggttgcggtcgacattgatgcaccaggagtcctggggcagttgcacgtcgatatgaatggtttcccccaacgcccgttgcaacaactcgcccaggccagcgtagatgcgctgcgggttgtacaccgccggagacaagggctggcgacgcgcaaaggccagcagttgcgacgacagcttggccccacgttccacggcggcgatggccgcggtgacgcgacgttgcacctgggggttgtccggttcatgcctggcgagcaaatgcaggttgccggcgatcacttgcagcaagttattgaagtcatgggccacgcccccggtcaggccgccaatcgcttccagcttctgtgactggcgcaactggtcttctgcggccgaccgcgcctgcacttcagcggctacgcgttgctccagattatgggtgagctcctggcgcacccgctcggacttcaccagttcggtggtttccaccacaatcgccagcaccccggccggctgttggttgtccccggccacggggctgtaatagaggtccagccatacgctttccggttggccgtgacgcgatagcaccagttccttgttattgaacgacaaggtgccgcccgccaggcacgtatccaccacatgccgattgaactcggccacctccggccagcccagttcgaccggagtgcccaagaggtagggatggcgcccgccggcaaatgccgaatagctgtcgttgtagatcatgtaccctgcccgcccccacagcatcaccatcggcacgggtgaggcgagcatcatttgcacggtgcaagccaggctcgtggaccactgatccaaggggccaaggtcggtacttgaccagtcaaacgtgcgaatccgctgggccatttcgccggcccagccttcacagccatgggggttggataaaaattgcatgattgggctctgtgcagggacaagacagtcgcaagttttggagcgcgccagcggtggatggtttcatcctgaacacagaggaatgcataaacccctggaactcaatgaaaatcccggctgcgcaccaccattccatccagcagcggcgtcaaatcggtgaggcgccccgcgatcaaatgccgcacctcacccaccgcctcccaacggccgtccaccttgagcaaacgcgagcccaccagcgcctggcgctgacgctcggccaggtcgcgccagaccaccacattgaggttgccgaactcatcttccagggtgacaaaggtcacgccgctcgccgtgcctgggcgctggcggccagtgaccagcccggcgatgctcacattgcgcccatgttccaccgccagcaactcctgggaactgcggcagcggcgccggtgtaactcggcgcgcaacaacgccaggggatggggccccagggtggtaccgagggtggcgtaatcggcgtgcaaatcttcgcctaccgtgggctcgggcaatgccacccgcgtttcatcggggctcggcaggccggcaaacaagcccagttgctgatgcacaccggccacgtcccaacgcgcctgatggcggttgccggccagggcgcgcaaggccccggcgtccgcgagcagcgcctgggcacgtgcatccaggccggcgcgggcgtccaggtcagcgatgtcgctgaactgtcgatgctgacgcaccgcttcgatacgccgcccatcctcctcgcgaaaccccgagatcatgcgcaggcccaggcgaatcgccggttgctggccgtcaatgggctccaggctgcagtcccagtcactggcctgcacatccacggggcggatctgcaagcgatggcgccgcgcgtcctgcaggatctggtccgggctgtagaagcccatgggccagctgttgatcaaggcgcaggcgaatgccgccggctcatggcatttgagccagcaactggcataggtcagcaaggcgaaactggcggcgtgggactcagggaaaccatagctgccaaagcccttgatctgctcgaaaatctgcgcggcaaaggcttcggtgtagccgtttttgagcatgccggtgcgcaggcgttgctgatggggctccaggccgccgtggcgtttccaggcggccatggagcggcgcaactggtcggcctcgccggggctgtagtcggcggcgaccatggcgatttgcatcacctgttcctggaacagcgggatgcccagggtgcgttccagcacggctttcaattgcggcgacggataggtcgtgggctcttcattattccgtcgacgcaagtacggatgcaccatgccgccctggatcggcccaggccgtacgatggcgacctcgatcaccaggtcataaaacgtctgcggcttgagccggggcaacatcgacatctgtgcccgcgactcgatctggaatacaccgatggtgtcggccttgctgatcatggcgtaggtggccgggtcttctttgggaatcgtggccaggctcaagtcccggtggcgatgccggcgcagcaaatcgaaacagcggcggatcgcgctgagcatccccagggcgaggatgtccaccttgagcaagccgacggcgtcgaggtcgtccttgtcccactggataatggtgcgctcggccatggccgcattttccaccggcaccagggtgtccagcgggtattcgctgatcacaaagccgccagggtgctgggacaggtgccgcggaaaaccgatcagttgctgggtcaacgtcaagacacgccgcagcagtgggctgtccgggtcgaagccgctttcacgcaggcgctccaacggcggcgcctcatcgctccagcgcccgcagcaatcggccaaggcgttgatctggtccggcggcagcccgagggccttggccacatcacgtaccgcgcccgtggcgtggtaactgctgaccaccgccgtcaaggctgcacgggtgcggccatagcgctggaacacgtattgcagcacctcttcgcggcgttcgtgctcaaaatccacgtcgatgtccggcggctcgttgcgctccttggacaggaagcgctcgaacagcaggttggtcaggctcgggttgatttcggtgatgcccaaggcaaaacacaccgccgagttagccgccgaaccacggccttggcacaaaatcgaacggctgcgggcgaagcgcacaatgtcatgcacggtgaggaaatagctttcgtagcccagctcgctgatcagctgcagttcacgatggatttgctgcaaggtcttgtcgtcgatgccttcgggccagcgctgggcgatgccttcttcggtgagggtgcgcagccaggattgggcgtcatgccccgcgggtaccagctcgcgtggatagtgatagcgcaactggccgaggtcgaaggtgcagcgccgcgcgatggcgagggtttcatccagtaaggcctgggggtacagcgccgccagggcatccaggctgcgcaggtggcgttcgccattggggtgcaggcgcgtgccggcttcggccaccggcacatggtggcggatggcggtcatggtgtcttgcagggcacggcggcctcgcgcatgcatatgcacatcgccgcaggccacggcagggatttgcaggctgtgggccagttgcaagcgctgttgcagatggcgcgcatcgtcctggccgcaatgcagatgcaccgccaaccacaggcgctggtcgaaggtgcggcgcagccagtcgaggctggcctgggtgtcgctgtcttgcgctacccacaacgccaaaagaccgggcaacggttgctcgaaatcttcctgtagcaggcgatagcggcccttttcagcccgccgccgggccagggtgatcagccggcacaggtgctggtaaccgctcaggctctctaccagcagcaccagtttcgggccgttttcgatgtgcatttcgctgccgataatcaacggcaagtctacggctttggcggcttgccaggcgcgcacgatgcctgacagcgtgcattcatcggtgatcgccagggcgctgtagccttggcctttagcgcgctcgaaaagttccagcgcactggaggcgccgcgctggaagctgaagttggacaggcagtgcagctcggcataattcatgctccctcctcccctgtaggagcgagcttgctcgcgaaaaacccgagggcaccgcgttcatcctggtttcccgcgttatcgttgacgaccttcgcgagcaagctcgctcctacagtaggtggcggctcaagggggctcatgcaaaccacccttgcaaccacagcccatcgccttgccctaccgtgcgataagcccagccctgctggccggcgcgggtctggatcaggtaatagtcgcgacgcacatcggcgccgtcccaccagccggattcgatgcgctccgggcccatcaggatctgtacgccgtgttcggccagcaaggtcggttgcggtaataaccaaccggggcgccggaccttgttcaagctcgggcacggctggctgtcggtcgcggcttgccaggcgcattcggggcggtggtcggcctgaaatcgcaggccctgcaccgcctcatcccccaggcgcgcccgcaggcgttcgcgcaattgttcccacggcagggtttgttgcgggcggtcgtcgaacaggtcctggcgttgcggcacgaacaccggcaagtcctcggccaccaggcgcacaccccgcaccggcgcggtgacctgtacctgttccaggcgcccacgggccagttcgaacaacatcgaaggctcgcgctcggcgctgagcaggcccaccttgatcacgctgtcgtgtgcctgggcatgttccaggtgcaggtcaaagcgctgcacgccactgtcgcggccgcacagaaaggccgacaggtcgccggtcaagcgccgcaaggggaacagcagcgcctggtgggattgcacatcgaaattcaactcgatgcgtgcatcgaactggtcgggcggttgatagaactccagggccaatggccgctgcccgctcagggcgtcgaggtgcttgagcaggctggcgtcaaagcgtctcgccagggtatgccgtggcaaggcctgcacctgggccaggctgcgcaggcccatgcgcgacaaggcggtggcggcctggggttcaaggcccgcgcggtcgataggcaacgatgccagggcctgcatcagggcgcggtcatcggccacggccaggccgtcgtagccgtttgccaatatccgcgccgccgccgggttgggcgcagcgacgatgcgatggcgaaagccaagttcggtcagctctttgcgcaaacgcgcctcgaggtgcggccagggcccgaacaggcctaggctcgattcgatctcgaacaacaaagcccgtgggtaatacaggctgacctgggagctgaaacgataggcccaggcggccagaaactgctgcaggcgctcgatctccaacgggtcatattcgacacaggcaaagtgcttgaccagggcatgggccgccgtcaacgattgcccggggcgcaggcccaaggcgcgggcggcggcgttgacggtttgcagtacacgccgctgcggcgtgccggccagcagcgccagcggctgctcgggttcggggtgcacacgctgtgccccgtccagcgccaattgcgggaagacaatacacacccaacgcatggcaacctcaatgccccgccagggcaatcggcgccggatgggccagcccgccacggcacttgagcacccgcacttgcgcgggcctggcctcgaccgccaagcgcagggcggcgggcgaggcattgatcgcctcgctcaaggagcgccaggcaaacgccagggtctgcccggtttccgccgctacctgcaaacgccgcaaggcacgatcatcggccttgcgcggccaacacaacaccgccccgcaactgcccgaacgcaggcattgctccaccgcccacagcgcgtcacgctcctcggcccggatgatggacaactggcgcacatccaccccggcgttctgccacgcatggggatagggggtatagggcggcgccaccagcacaatgcgctcgcccagggccgacaagcgcgccagtgtgggcagcaccagttgcaactcgcccactccgtcctgggccatcaggatttcactcaaggccgattccggccagccgccactgggcagcaccgcatccagcgccgccagccctgtgggatgtacgctggccggtggcgcggcgggccggcccttccagactcgcccgccattgaacagcgagtccagggcaaccacggcgcccatcagccttgcctcaccaggccgcagaacacgccttcgatggccaggtcctgctcgggcccgaccacgatgggttgatacgccgggttgcgcggcaacaggcgaaccctgtcgccgtggcgctcgaatcgcttgatggtgacgtcgccgtccaggcgcgccaccacaatctgcccgttcaaggcttcggcagtgcggcgtacgcccaccaggtcgccatcgagaatgccatcttcaatcatcgaatcgccctgcactcgcagcaggtagtcgggggttttggcgaaggtggcggggtccagttgcaagcggctgtgcacctcggcatcggcaccaatcggccgaccggccgccacacggccgagcaccggtacatccagccactcgggacgcgcaggttgattgagcaagcgaatgccacgggcctggttggggttgacctcgataaagccggcttcggtcagcgccaccacatgcttgcgggcgacgctgcgcgaggcgaagccgaacgcctcggcgatctcggcgaggctgggaggctggccttgttgcgcgatgcgctcgcggatgaaggtcaggatggcggtgcggcggggggtcaggtttgtcatggagtacatttgtactcctgtgggaaatttctgacaatannnnnnnnnnnnnnnnnnnnnnnnnnnnnnnnnnnnnnnngcatccctgccggtttaccccccaaatccctgtcgaattccggccagcgtggtttaacggggcgcctaagatcaagatcacaagcagatcaagatcaagagcggctcgcttcgcatcgtggttaccgtctgctgctacagcccacaaagttgtgtaggcgcctcaccacccctctttcaacatccgcacctccagatgctgcaacaacataatcgtcttgccatccacaatctccccactctgcaccatcgccagcgcctgctcgaagcccagctccaacacctcgatatcctcgccctcttcttccaggccaccacccgcccccactcggtcacctggctgatattcgccgataaaaaagtgaatacgctcggttaccgatcctgggctcatgaacgccgcatagattttttccacatgccccacgcgatagccggtctcttcctcggcctccaggcggatgcgctcttcggcgctggcgttgtcgagcaaaccggctgccgcttcaatcaggtagccggggtaatcgttgacgaacgtgggcatgcggaactggcgaatcagcaacaccgtgcgttgttcgcggttgtacaacaggatggtggcaccgttgccccggtcatacacctcgcgggtctgggcttgccaactgccgtcgcgacggcgcaggtcgaagctgtatttcttcagcaggtaccagttgtccgagagggtttcttcggcggtgatgcgcacggggctgttattcatgtgtgggcctttgcaggtggggcaggttcaagccatccaccctatcaacccgcacgaggattgttcaatgctgtaacactttcatcggtcacggccgtcgcattaatgcctacccgcccaggccatctggtaaaacccgtgcttcatctttgttctggaaccttcatgtcttctgcttctatgccccgccggggcctgcgctggtttgtctggctgtgcatggccgtgttgattgtcggcctgccggtcggttgcgccgtgttgcaacacaaggagcgcgaacttgtgtttcgcatcgagccgggaaccgccggctggtacaccggcctgcccaaggcggtgcaggaattcgaactcaagcccgccagtttcaaagcagggcagaacattcatggctggtggtacccggcagccaacaaagacgcgcccgccatcctctacctgcacggggtacgctggaacctcacgggccaattgtttcgcatcgagcaattgcatgccctgggcttttcggtcctggccatcgactatcgcggctttggccaaagccagggcgacttgccctcggaagccacggtgtacgaggacgctcgcattgcctgggagcgtttccagaccctgcaaccagaccccggcaagcgcctgatctacgggcactccctgggtggcgcggtcgccatcgacctcgctgccgagttgggcaagcaggtgccattgccggtgcgcgggctggtgatcgagtccacgttcacctccctggcggatgtcgccacggccgttgccaacacctcattgccggtgcgctggttgctgtcgcagaagttcgattccatcgacaagattgccgacatccacatgccgctgctggtggtccacggcctcgacgaccgctacgtaccaccgcgcttcagccagcagttattcgaagccgcccagcaacccaaacacctgttgctggtgcccggtgccagccataacaacagcatgaacctcgccggacgcagctatgggcaggcgctggaaaacctgatgcgcacgaagatgcccgcccaggtggtgacacactccacaggccgcgataacgcctcataaatacgcttttcggcactgggttcgcgcttggctgtcaagcgcaaaccctggccatgttggcccgaaatgcaagttgatcaaataatgatcttcgcggaaatcgccaacgctgccgggccttcgcaaagttatccacagagatacccacggttttcgtggacaactctttttatatttttacgttttttctgctcaagccgtgcttccaggaaaggtgccgggcaacaggatttcgcgattcacctcgcgtatatccttatagccgcagagcgccatcgacacgtccagttcgcgggcgatgatatcaagcgccttggtcacccccgcctcgcccatcgcccccaacccatacaaatgcgggcggccaatcatggtgcccttggcgcccagcgccatggccttgagcacgtcctggccggaacgaatacccccgtcgagccacacttcaatgcggttgcccacggcctcgacaatcgccggcaattggctgatgctcgacggcgcgccatcaagctggcggccaccgtggttgctcaccaccaacgcatcggcaccgcaatcggccgccaagcgtgcatcctccacatcaagaatgcccttgatgatcagcttgccgccccaacactttttgatccacgccacatcgtcccaactcaggcgcgggtcaaattgctgggcagtccacgacgacagcgaactcatgtcggccacgcccttcacatgcccgacgatattgccaaagccgcgccgttgagtacccagcatgcccatcacccaacgcggcttggtcatcatgttgaggatattcggcagggtcagcttggggggtgcggacaggccgttgatcaagtccttgtgacgctgccccagaatctgcaaatccagggtcagcaccaatgcatccaccccggcagccttggcgcgctcgatcaactgctcgataaaactgcggtcgcgcatcacatacagctggaaccagaacggctggccgacatgctcggcgatgtcttccagcgaacagatactcatggtcgacaaggtgtagcgcagcccgaacgcggcagcggcacgggcagtgaggatttcaccatcggcatgctgcatgcccgccagaccagtcggcgccagcgccacgggcatggccatgttttggccgatcatactggcgcggatcgaacgctcgtcgatattgcgcgccacccgttggcggaacttgatacgtgcaaaatccgtttcgttggcgcggtaggtgctctcagtccaggagccggaatcggcgtagtcgtagaacatgcggggcacacgcttttgcgccagcttgcgtaagtcttcgatggttgtgatcaacggcatcgggtcacctctccctgaactgaacacagagagtaaccggcaggagcgtgggcaaccagccgttgcgtttagatgaagcggggattaatctcgcacaaacccgcaataaagcgcacaaacatgcacaacactcatcaagccatcgacctgccttccctgcgcaagcagaagattttgttgttgctggaacgcgacggcaaggtcaccgcctccgagttggtcgaacatttcgccgtgtctcaggacaccatccgccgcgacctcggcgaactcgccgccgccggcctgctgcaacgcgtacacggcggcgccctgccccggcccaaggataccggcaaggatttctttacccgtgtcggcgagaccaacgaggtcaagcgccacctcgcacgcgtagcggcaggccgggctgaagacggccagatcgtgctgttcgattccggctctaccaccttgcagatcgctcagtgcttgccccatgcactgcacctgaccgtgatcacgccatccccgatgatcgccatcgccctggccgaccatccgcatgtgaagatcatcctggccggcggccaactcaacccagccaccctctccaccggcggccatgaagcggtgcgcctgatccagagcgtcaaggccgacctgttgttcaccggagtgtgcgcattacacccacaagtgggcatcacctcgctgcattttggtgaagtggccgtcaagcaagccttgctcgacagcgcgtcccacgtcatcgccgtgaccacctcagacaaactcggcgcagtggaaccctttgtggttgcgccgtgcagccgtattcatacgctgattaccgagtgggacgcgccggatgtgcaggcgtatgaacagctggggctgcaggtgcagagggtgtaggagcgagcttgctcgctcctacaaaaagggccagccggccatctggagacgctaaccacgatgcgaagcgagccgctcttgatcttaggcgccccgtcaaaccacgctggccggaattagacagggatttgggcccccccccaaatcactggcggattacgggcacaccgagcctgagcgaggtgccgagtggtggggcaagagcgttttgcttactttgccgcttttgcaaagtgagccgccgtcagggcggaaccctaagtagccgttaccgcagcaatggatatgtacccaatccaactgtgttgactgccaggccgccttcgcgagcaagcacgctcccaaagttgggttgcggggtgtcaggtaggtaagtgtcggctggcaggccgtcatcgcaggcaagccagctcccacagttgaattacagggcgtcaggcagcactgcgaatcttgtgcaaagcctccgccacccattgaccaaacgcatccaccggcccttgcaggttgccgagaaaatgcggatagatcagccacaaatccatcaccggcttgaagtccttgagaggcatcgccgccagctgctcgcgatgagcactgcgttccagcaacggacgtggcaccaggccaaggccgaggccatcggccaccaagcccagttgcagttcagtgccaaaggtttccaggttcacccgcagcgccaggccctggtcagacaaggtgcgctgcaaccccgcacggaacccgcagccgtccggattaagaatccaaccgctctggtacacgtcagccagcttgcacggcttcttcggcagttgcgccttggcacacaccaccaccaactccatcttgccgatggactcacccactaggttgtccgggaagatcttgcccgcagggaacaacgccaccgccgcatccagttcgccgcgttcgatcttgccgaccaattggctgccccagccggtggcaacctgggcgcgcaagtcggcgtattcgctgcgcaggtgcttgagcgcgtccagcagcaccacatcgccgatggtctgcggtacacccaggcgtagcacgccggtgggcggagcatcggtggccaccagttcgcgcagggcatccatctcacgcaggatcaaccgacattgctcataaacgcgggtaccgatcagcgtcggcttgagcggcttggtgttgcggtcgaacagctccacccccagtgcctgctcgaagttctgcacgcggcgggtgatggctggctgggtcagctgcaacgacgcggcggcatggctgatggactggcaacgaatcacttcgacaaaggcatcgatatcgtcaattttcatttgggccgcacatacagatcagtcattaagatgtgcgtgaagcatagtggccgcacacaggtctggatagcccacccagtgatcaataacgtctaacgctattcaaaccggttctaaattaccttcggctataagctaatcattaaaaaatagcatattaaaaataaacattatgcttatataaaagcacaccaacagcccgatggaatggtcatgacccaggcccgacaccccgagagactcagagccttcataggcgccctggcggaattgatcgacggcaacccgcgtgaaggcgacctgctgcaccgtggcggcaagctgctggcgcaactggtcagccacgatgattggctgcccgacgaattcgcccaatccgaccccgagcgctatcagcaatttttgctgcatgccgattcgcgccagcgcttcagcgtggtcagctttgtgtgggggccggggcaacgcacgccgattcatgaccacagggtgtgggggttgatcggcatgttgcgcggcgcggagttttcccaggggtttgcccgggcgccgggcggcagcctggtagcgcaaggcgaccccgtgcaattgctgcccggccaggtcgaaacggtgtcgcccaaggtcggtgatatccaccaggtcagcaatgcacacgctgaccaagtgtccatcagcatccacgtatacggcgccaatatcggcgcggtgcgccgggcggtgtaccagcccgacggcagcgagaaactgtttatctccggttattccaatgcctacctcccgaacatctgggacctgtccaaagaaaagagccctgccctatgaccactgtatcgacccgcagctttgcgcagattcgccaggccctgttggcacgcgaagaagtcgcgctgatcgacgtgcgtgaggaagccccctttgccgaggcccatccgctgttcgccgcgaatattcccttgtccaagctggaactggaggtgtacgcgcgcattccacgccgcgatacccaggtcaccctgtacgacaacggcgaagggctggcccaccgcgccgccgaacgcctggttgcactgggctacacccaggtcagcctgctggagggtgggctggacggttggcgccgggccggtggcgagctgtttatcgacgtcaatgtaccgagcaaggcgtttggcgaactggtggagaaccagcgtcacacgccgtccctggccgccgaagaggtccaggccttgctcgacagccaggccgatgtggtggtgctagatgcgcggcgtttcgatgaataccagaccatgagcatccccacgggcatcagcgtgccgggggctgagttggtgttacgcgcccgtgagctggcgcccgatccggccacgcgcattatcgtcaattgcgccgggcgcacccgcagcattatcggcactcagtcgttgatcaacgccggcatccccaacccggtggcggccctgcgcaacggcaccatcggctggagcttggccgggcagaccctcgcccatgggcaggcgcgccagtttgcaccgacctcggaaaaccatcgccagctggccgcccaagaggcccgtggtgttgccgacaaagcctcggtaaaacgtgcaaccctcaatgatctgcagcgctggcaacaggacgcgacacgcaccacttacctgttcgatgtgcgcaccgtggaagaattcgaagccggccacctgccgggcgcccgcgccaccccgggcgggcaactggtgcaggaaaccgaccacgtggccagtgtgcgcggtgcgcgcctggtactggtggacgacgacggcgtgcgcgccaatatgtctgcgtcgtggctggcccagttgggctggcaggtgtacgtattggatgacctgcaagcagagcacttcagcgagcgcggcgcatgggtcgcgccagtaccgccgccgccccaggccgaactgatcagcccccacacccttgccgactggctcggccatggcgacaccctggtgctggacttcaccgccagcgccaactacgtgaaacgtcatatccccggcgcctggtgggtgctgcgcgcgcaactgccagaggccctgggcaaggtaccgagcgcccagcgctatgtgttgacctgcggcagcagccaactggcgcgcctggcggtgccggaagtcgaggcgcttaccggcaagccagtctttttgctgcaggacggcacagccggctggatccaggcgcagctgccccttgagtcaggtgaaagccacttggcgtccccacgtatcgaccgctaccgccgcccttacgaaggcaccgacaaccctcgggaagccatgcaggcttacctggattgggagttcggcctcgtggaacaactggcccgcgacggcacccatggcttctacgtgatctgattcagcgctgcaccgtttcgcccaaccgaccccttctccaggcggaggtactttcctttacctaacgcctggagtttttcccatgctgtacgccattgcattcaaacgcctgttgctgggcgctgccctcgccctcggcctgctttctaccgtccaggctggcgacctgcaaccgctgcgcgtggccaaccagaaatccacgatcaaggcgctgctggaagcctcgggcgaaagccagaacgtgccctacgagatcaaatggtcggaattcccctcggcctcgcccctgggcgaagcgctgaatgccggtgctgtggatgtcggcgccctgggcgatgccccttatgtgttcgccctcggcgccggtgcctcgatcaaggtgatcagcatcatccatgccgaaggccgtaacaccaccgcgctgctggtgcccaaggattcaccgatcaagaccgcggccgacctcaagggcaagaagatcgtcaccgggcgcggctccatcgggcattacctggcgatcaaggccctgaacaatgccgggctgaccacccaggatgtgcagttcatcttcctgctgcccgccgaatcccggctggtactcgacaacggcaccgccgatgcctgggcgacatgggacccttacaccaccgtggtcacctcacaaagcaatgctcgggtgttggtcagcggcaagcacctgctgagcaatcacctgtacttcgcggccaccggccaggccattgccgacaaacgtgtgcaactggacgactttgtcgcccgcattgatcgcgcctatgcctgggccaatacccatcccgagcaatacgccgctgcccaggccaagatcactggcctgccactggccgtacatatcgaagtggccaaggacacccatctgtcccccgtcacgattgacgatacggtgatccacggcctgcaagccaccgccgacacctatgtaaaagaaggccttttgagcaaacacatcgacgtctcccagggcttcgattccagcttcaacgccaagcgtatccccctcgaacaagcctcgcgctaaggagcagaacatgagcaagccacgtcaattgaaactcggtgccatggtgcacggcgtcggccacggttggggcgaatggcgccacccgcaggcacaacccgacgccagcaccaatttcggcttctacaagcagcagaccgcactggccgaagcagcccggttcgacttcgtgttcatcgccgacagcctgcatatccaccccaagtccagcccccattacctcaaccgcttcgagccgctgacgatcctctcggccctggccgcgctgaccactcacatcggcctggtcgccaccgtgaccgtcagctacaccgagccttaccaggtggcacgccagttcgcttcgctggaccatatcagcggcggccgcgccggctggaacgtggtcacctcgtggctgagtggcaccgccgataacttcggcaaggccgagcacccgccccacgccgtgcgttatcgcatcgccaaggagcatttgaatgtggtcaagggcctgtgggattcctgggaggacgacgcctttgcctataacaagcacagcggcgaattcttcaccccgggcaagttgcatgcgcttaaccacaagggcgaattcttctcggtcaaaggcccgctgaacatcgcgcgctcgcgccagggccaaccggcgattttccaggcgggcacttcggaggatgggcgtaactttgccgctgaaaacgccgatgcgattttcgtgcatgtggacactgtcgacgagggcaaggcctacagtgccgacttgaaaaggcgcgccaagcgctttggccgcgacccggacagcctgtcgattttgccgggtattcgcccgattgtcgggcgtgatgcggccgaagtggaaagccgctaccagcaagccgtggcgctggtcacggtagaagacgccatcgtcgcccttggccggccgttcaacgaccatgatttcagccagtacccgctggatgcgcccttccccgaactgggcgacctgggcgccaacagccagaaaggcggctccgaacgtatcaagcaactggcccgggacgaaggcttgaccctgcgcgaagtggccctgcgtttctcacggccccagcgcgactttgtcggcaccccggaacaggtcgcggatgcgatccagacctggttcgagagcggcgccagcgatggtttcatcatcaattcggtgctgccggatggcttgcagtatttcaccgagctggtggtgccggtgcttcaacagcgagggttgttccgtaccgagtacagcggccataccctgcgcgacaacctcggcctggaggtgccggcgaaccgctacagcgtgattgaagagccggtggaggcgctggtatgagccaatcgcgcagtcgctcgacctatgtgggagctggcttgcctgcgatagcggtgtgccagccaactacactaccgcctgataaaccgcgatcgcaggcaagccagctcccacaggaactcgcccaattcgatacactgcttgaacgcctcagcgccgagctggccagtaccgcgcccctctatgacgaaagcggcgccttcccccacgctaatttcaagctcctgcaccaacaccaactcatcgccctgaccgtgccgaagaaacttggcggcggtggcgccagcctggcccaggcgcgcaaggtcatcagcgccatcgccaagggcgaaccgtccacggccctgatcctggtgatgcaatacctgcaacacagccgcctgcaagacagccagacctggcccgcacacctgcgcatgcaagtcgcgcaagacgcggtgcaaaacggtgcactgatcaacgccctgcgggtcgaacccgacctgggcaccccggcccgtggtggtttgccggccaccaccgcggtgcgcaccgccgagggctggcgtatcagtggacgcaagctctactccaccggcagccatggcctgagctggttcagcgtgtgggcgcgcagcgacgacgccgacccgctggtaggcgcctggctggtgcccaaggccagccccggtgtcagcatcatcgacacctgggatcacttgggcatgcgcgccacctgcagccatgaggtggtactcgacaacgttctggtgcccctggaccatgcggtcagcgtcagcccctggagcgccccgcaagcggagctggatggcgaaggcttcctgtggatgtcggtgttgctgtcgtcggtgtacgacgccgtggctcaggcggcacgggactggctggtggactggctggaggaacgcaagccgtcaaatctcggcgcggcattgttcaccctgccgcgttttcaggagaccgtcggccatatcgacacgctgctgtttgccaaccgcagcctgctcgacactgccgccgcaggccacacgccaacggccaatgccgcacaggtgaagtacctggtcaccggcaatgcaatccgtgcggtcgagctggccatcgaagcctcgggcaaccctggcctgtcacgccatagcccactgcaacggcattaccgcgatgtgctgtgcagccgcgtccacactccgcaaaatgacgccgtgctgcagggcgtcggcaaagcggtgttcaaccagcgccagaaggaacgcacatgagccaggtgattattgccagccaactggacgaggacttcaaccaggtgatccgtgagcgtcttgcgccactgcacccccaagcccaggtaatcggcgtgccggtcggtgtgcccagtgacttgccgccccacgccaatatcctgctgctgcgcccgatcaatgtgcgtggctacaccgcccccgataacccgccaccgggctggccctacggcgcacagtgggtgcacctggtatcgtcgggtatcgacttctacccgcggtggctgttcaacggcccgccggtgaccacctcacgaggcagtgctgccgataacctggcggagttcgctctggcggcgatctttgccgcgtccaagcatttgccggatatctgggtaaaggatgcccaatggcagttcaccgcgctgcgcccgctcaagggcaccacgctgggccttttgggctttggcgcgattggcgcaagcctggcgcaaaaggccctggcactggggctcaaggtcgtggcactgcgtcaaagcacaacgccgttcggcctcgatggcgtggaagcggccaatgacatccacgacctgtttgcccgcgccgatcacctggtggtggcggcacccctgaccgaagcgacgcggcatatcatcgaccgtgatgtactggccagcgccaagccggggctgcacctgatcaacattgcccgcggaggcctgctcgatcagcaagcgctgttgcacgcgctggataacggccagatcggcctggcgtccctcgacgtcaccgagccagagccattgcccgacgggcacccgctgtacagccatccgagggtacggctgtcgccgcatacttcagctatttcgaccaacagcaaggaagaaattgcggatacgttcctggcaaatctggaacggtatgtggcgggccttgagttaagtaacctcgcgaatgcttgagggcttgctcgcgaacgcggtgtgtcagtcactgcatctttaactgaaccaccgccaggagaaattcatttgatgcggtagtggaaggtattgcgcaccgccggtacggcaacagccttgccatcgacgattctcggctggtagcgaaaagtattggccgctgctaatgagggccgaatgaacaacgggtggcagccgtccagcaccttggggttttccacgtgcccctgggtgttgacggtgtactccactgaacagtcgccttcgatgttcttgtccagggcgcgttcggggtagtccggggcggccttgctcaagggctggtactggcggctgtcgaatgctggggtaggcgcaggcacgggggctctggctttttccgaagcggcacgcgcctggctcaggcgctgctgttccaactcacgattgcgctgctcggttgccatgcgctgttgttgctcgagtttcttttcttcaacccgcttgcgtgccagggcggctttctcgagcttttgcgcctggacctgcggatcaactgtcggtttggtcggtaccgggataacaacaggttctggcagcgcggcagcgacggactcaggtgtcggtgccggtgccggcgcaggtaaaaccaccaactgcgtgtgcatcacccgtggcgcatccacccctggtcgctccgttgaccagcccagcatcaacgccactgccaccgcaccatgcagcgccacggccagactcgctgccaggcttttgcgccagaaaccatcgccgttgggcgccaaggccagtgccggactacgcatgctcatcgctgtcattgtggggcctcggtgacgagcccaaggttgctgacaccgcccttctgcagtaccgccatggccgccaccacacggccgtaaccggcattgtcgtcagcacggatatacacctgggtatcgctgcgcgccgccaccacctgcatgaccttggcgctcatttcttccagggtcatcgcactgtcggtctgctggcgggtgtccagttcgtcacccaggttccagtagtagccaccgtcggccttcaccgataacgtcaggatctgctggcgcgtatcgctggccagcgcctcggcggcgaccttgggcagttcgatcttcacaccctgggtgagcatgggcgcggtgaccataaagatcaccagcagcaccagcatcacgtcgatgtagggcaccacattcatctcggccttgggcccgtgcttgcgttgcggcctgatcaacatcgctttgctccttgttcaggcggccacggccaggttgatcgaggtaccgcgcagcgtgcggtgcaggtgcacttgcagctcattgccaaaagcgtagtagcgcgtgagcaaggtctggctgcgtgccgcgaaacggttataggcgatcactgccggaatcgccgcaaacaggccaatagccgtggcaatcaaggcttcggcaatgcccggtgccacggtcgatagcgtggcctgctgcacctgggacaagccaagaaacgagttcatgatgccccacacggtcccgaacagaccgatataggggctgaccgaccccaccgtcgccagaaactgtaagcccttttccagctccagttcctgctcggtgatcgctacctgcaaggcgcgctccacaccctcgagcacggccggatcgtggtggcgcagatgctggtattcctgcatgccggcaataaagatcggcgccacaccgccctcgcctgcctgcacggtttcgcgatacaagggctgcaggtccgacgccacgcgaaagcgcgacaggaagccgttaagctgccgatccaacccacgcagcacacggctgcgctgaatgatcaggtaccagctgagcaaggatgccaacagcaaagtgatcattacggccttgaccaacaggctggcgtcgctgatcaagctccagatcgtcatatgttccatcgtcgcgcgcatggtgaagctcctattcgattaaaaacggatgactgcgtgatgacagctcaaggtaatttcaacgcgcggctcacctcggcccagggcacgaacttgaagttctgggcttgctcgggcatgcgcttgcggccgtcctgcaccaccagcatgccctggctccagggcccgccgaggttgacagcagtgacctccaggccatcggtttccgaggcgccatcaatgccggcggccgcattgaggccaacgcgcaaggcgccgcgcacagcgaatggcggctcggcgtccagcaccaggtagctgtcattgccttggctggagaccaccaggtaatcccgcgcggggctttgatacaacgccaagccttcgacgtccgcgtgcagttgcgcgccgactttgatcaccgaagtgagcgtggccggttgctcggcacgggcatccatcgcccacacgccgacatcttcctcaccgatgaacaagcgttggcgctggtcatcggccacacagccctcgggttggctatcgaccttgaactggcgcaccaactcgccctgcacacggccagtcggtgcactcaggcggtattgcaggaaggtgccatccttgtcattggcaaacgcgtaaagctcgccgctggcgggctggtaaaggcagataccgtagatgtccttgagtggcgtggggacctcaccggcttcacgcaactcgccgctctgacggtcgatgctgaacaggctcaggctgttgcggtcgcggttactcgccacggccaggtcgacggtgtgcgtacccagtttgaagcctgggcgtaggtctacattgttcagccgccccactgccagttcctgcagcaacttgccgtcgagatcgtaggccagcaggccctgtttcttgttggtccccagcacacgacttttggccggcgtgtccgggtgaatccagatggccgggtcatccgccgcgtcgccttggcgacccacgggttcggtctggcgcagtgcggcgacttgcgcaagtatcggcgcaaccggcaccggcgtggcttgccagtcgagacggccctgatagagctggccgctgtcgtcatcccgcaccagcacctgccggccctggatcaccagttgctccggttctttgaggcccggcaaggcgaggctggattgcccaacccaacgttccccgacttgctggaacagctgcaattgcgcggttttcgggtccagcacgagcaccccgcccggcaccagcgccatggcgcctgcttcgcgcgcggggtcgtcgaacagcgccacgggcgtgcgtttcacctcggcttccgggtgcgccgggtaggcccaccagccgacgttttgctcgttcaccaccaatcgctcggccgcatcatccacttggcagtactgcgccgatggcggcagtgacaggctgcgaacacgctgcgcctgggccagcagggtcgagccattgcccaccagccactgctcgcccttgccctcttcaccgaccagaaacacaaacaggttggccgccgaatcgcgatagaggcacaggctatttaccgcaaagtcgcgggtcggcaggtacagcggcgcaccccaggttttgccgacgccatccagaccgatcagcaaggcctgctggcggtcgttgtcgaggctggcgatcagcgattgagtgccggcagcgcgggtgtcgaggctgctgaaacggcccttgaaccgggccagttcggcgcctttatcgtcgagcaacaacaggccgtcgcgggcactggcggccacgcgctgggtgccgccgggcaggaaggccacggcttgggcattcaggctgggtgcccaaggggtcagcggtagctcggtggcgaacgcattgccgctgattaccaacgcaaccagcaggcacagcttggaaattctcatgaacagacaatccttcgaaaacaatggagatcccgtttgggacggcttgccctgatgccctgtaggagcgcgcttgctcgcgaaaaacgcacaggcgccgcgctcattcaggcgacccgcgttatcgctgaggtttttcgcgagcaagctcgctcctacagggggcaacggttagaaatgggtgaaggtcaggcccagcttgtaggtggggccgtactcttcgtactggccgttgtagctacggtggccggtgtagacgaaatacgactcgtcggtgaggttctgtgcctcgaagctgacctgcaggtttttggtcagggagtagcgcgcgctgaaatcaacaaaggtttgcgcgtcgacgtgcaggtcatgggccttgtcattgatcgacgccagctcgtacaaataggccgatttgtaattggccgagaggcgcaagctgagtgtgtcgtcttcccatcccagcatcaggttaccgaccgtgtctgactggttgggcaggctgatgttgcgcttgcgagtgcgcccgctggcgctgtcgaagccctcgatgtccgcgctggaacggctgaaggtgctgttggcaccgatcatcaggccgttccatggcgcaggcagccagtcgaacttctgtgagtaggccagttccaggccatagagtttggcgctgtcgccgttggcaaaggtgtgcgcctcggcgaagttggcccaggcaccggtaccggccacgtcggtgttgtagacgaagttctggatgtctttgtagaacacgaatgccgacacggtaccggcgcggcccatgaaatgttcgatgcccaggtccaggttgcttgattcgagcggcttgaggtccgggttgccgaaggtggcttcgtcatcgtcgatcacaaaaccaggggccaattggccaaaggtcggacgcaccaccgatttggtccaggcggcgcgtacctgggtgttcttgtcaatctggtagcgcgcatgcaggcccggtagccagtggtgataacggcgcttggtctcggtggcgctgaactggccgtccgtggcgccggtgcccttggcttcgaattcggtaccttcgtaacgcatgccggcaatgaagcgccagtcgtcgataacaacggtgttcatcaggtagccggcgttgatgtcttcgcgaatggtgaagtcgttgaccgtggattcggtggggtcatagaagtcatcgcgattgaggccgccgatcagttggcgaatattgcccgcgctgatgcccgggccaaagcggccgagacggtagtcgacgttgcccttctggaactgcgtaaggttgagttgttcatcgctcaagccctgttcatccaggtccttgtagacccaggcctccaggtcattgtccttgtggcgccggctgaccttgccgccgaacttgaactgggatgcgtaaccgctaaggtcgtagtcgcgggccagatccaggcgcaggttcttctcggtgtcctgggtgtgctgtttttcccagtcgactttatcgaggctgaaattggcggggtcgtagaaaccactgccgatgatcgggcgcggcttggtcttgtcgtaaaagccgctgtcggcaaagtcaccgccgtcgaaggtcgcaccggcaatatgccccgggctgtcttcgctggaacggctgtacccggcctggccgctcagggtccacaggccgagcatgcgttcaccgcccaatacgtaggactggatttgctgggtttcctcacggttcttgagcttacgcttgccctcgacttcgcccaattcgccgggcgcttgcgggtcagcgaactctaggctggcagcgttacgggtttcggtgtccttgtagcgactgtagagcgtgcgcaggtagtagctgctcaagtcatcgggcgtgtaatcgaagttaaggccaccaccggcgcgttcacggctgatgtcgtagtcgcgctgctcgaattcgttgagccgggcaccgttggtaaagtcccaggcgccgccagtttcgacgttgtccgagccaaaatcacgcttctgccaactgagcgccgcggccacgccaaagttgtcgataccgtcgccgaggctgaaccggttactggcggcgccggagaatttcgggctggtctggtgtgtgttcttgtcgtagctggcctcagtgctgccggtgtagaacaggcccttgtgatcgaacgccgacaggctcttcacatcaacagtgccgcccagggagttggcgtccatgtccggtgtgagcgtcttgatcaccgacaacgactgcaccaattccgaaggcagaacatcaagggccacggcacggcgctcgctctcaggcgagggcaccagggtgccgttgatggtcacactgttgaggtccggacccaggccgcgcacgctcacaaagcgaccttcgccctggtcacgttcaacactgatgcccggcaagcgctgcaccgcctcggcaacgttctcatccggcaactgcgcgacgccgtcagcatgcaccacgctcttgatgctatcggaagagcgctgctccttgagggcgctgtcgattgcagcggcttggccgaccacatcgacatgctcggtggtggccgcttcggcggcattgacccgctcgcaggctatcgccagggccaaggcggtaagcgtaaagctgacgagcccggtgcgcttgtacatgaaaccctccccaagaatccgttggcgccaggcaagaggcccggcaactgggagggcaagctagggatggggcgtgacggttctgtgacagggttgcgggcagagcctgtcaaagcggggtttacaagcttgtggagggctcaaatgagctgaaatgacctcggtcagaggtgggagctggcttgcctgcgaaggcggtcgacggtaactacgatgcgaagcgagccgctcttgatcttgatctgcttttgatctcaggcgccccgttaaaccacgctggccggaattcgacagggatttggggggtaaaccggcagggatgccggtttagccgcccaaatcactggcggattacgggcacaccgagcctaagcgaggtgccgagtggtggggcgaggaccttttggttacttttgggtccttccaaaagtgacccgccgtcagggcggaaccctaagtagccgttaccgcagcaatggatgtgcacacaatacaactgtgttgactgccaggccgccttcgcgagcaagcccgctcacacagttggatggtggggggtcaggtggataggtgtcggctgagaggccgtcatcgcaggcaagccagctcccacagtttgattgcggggtgtcaggtagatatggggcggctgtgaggacgtcatcgcaggcaagccagctcccacatggggtccatgttcagcatgaaaaatgcaccgagggcatgagctgattcgaccctcccaccccgtcatccaaccgtcacatcaatctgctgtgctggcgcccatcgcttatttgcccaaggacccgtggccatgttttccgtgctcaaaccccaccgctggaaactcgcgttgctactgatcgccgccaacctcggactgatcctgcacctggcctgcggcgagctcaaaagcgtcagcgaatgggtgtggctggatatcatcggcgaaggcggttcggcgctgctcgcgctgatctggctgggcctggtgttgaaaagccgccccgccggacgggtcacccaatacctggcgctggggctgtcgtgcatctttttttcctggtggatcgacagcctcgacgaattcatccgcctgcctgacagcatctcctgggatcactggctggagtcagggccaatgccggtgggcatgatcctgctgacgatcggtatctaccactggcaccacgaacaactggcgatcagcgcacagatggaaaaacgcgagcggttgtttcgcgagcatcggctattcgacaaactcacccccctggccggtgccgactacctcaagcgccaactcgccgacagcctgcgcgacagccaagagcagcaacaaccgctgtcgctgctggccctggacctggacaacttcgccgccatcaaccaggcctacgggcatgccgagggtgatgcggtgctacaggcggtcagccatgtgctgttgctcaacctgcgccgccaggacctgttgtgccgcctggcaggcgatcgttttgtggtgctgctgcccaacaccggcgagcgccaggcccagggtctggcactggagttgcaacacgcggtgcagagcctcgcccacaagacccggcaacagggcgaacgcctgcaactggcggcgaccacggcggtggtgatggccttgcaagagtcaccccacgagttgctaaagcggctgaatatgggcctggcccgcgccaaacaccctcttgcgaaaagcgcctgaaatggctgtgaaaaccagttggtatgaaaacgacagccgcttcatccccggtcattatcaacccgccacgttgatcgacctgggcttgtcccgggacatcgacagccatcgtttgctgcgcggcaccggcctgttccacgaagacatcctggccggcaacgcgcggttgagcccgcagcagttcttgggcttgatcggcaacagccgcaaactgctggatgccgatgacagcagtttcctgtttggccaacgcctgctgcccggctactacggcgccgccagtcatgcgctggggcatgcacacaaccttcatcaggcgctggagatcctgatccagcaacaagtgctgctcagcccgctggccacgctgcaagtggagctggatgagcaccacgcttacctgtattggttggacagttgcggcgccggcgaacactggcgctttctgctcgaagccagcatgacctcgctggttgccatgagccaatggctcagcggccagcgcttgccgtgggtgtgcagtttcagccatgccgaaccccggtacgtcgagcaatactgggtgcatctgggcgaacacacacgcttcgaacgtccgctggacatgatgtgcctcccccgtgaatacctcacccacaactggcccggtgcttcggccaccgcgggccaggtcgcacgccagcaagcccttgaacaaatcgagcaactgggctttgccacaagctttctggactgcctctacggctacctgcgcgaacacgtgcgccagccaccgagcctggaacaagccgcgcacaccttcgacatgagcccggccacgctaaagcgcaagttgcaacggcacgacacgggttttcagcaacaggtcgaccgggtgcgcaagcacgtggcgttgcacctgtaccaggccaaggggctgagtaacgaggaagtggccgcgtacctgaacttcaacgatgcggcgaattttcggcgctcgttcaagcggtggacgggcagtacgcccaacctgatccgccaactgttcagcagccgctagccaggcgttcgcgcaggaactccaccagcgcttgcaccgggcgtgaactctggcggtgctgcgggtacaccgccgacagggtcaaggcctctggggcgaagtcttccaataccttgaccaagcgaccgtccttcaaggcctcgctgacaatgaacgtcggtagataggtaacgcccagaccggcaatcgcggtatcgcgcagcaggtcaccgttattgacgcgcatgcgtccgctgacgctcaaggcttgcaacttgcctttgaagcgccattgcacctggcggccgtggccgtagggcaggcagtcgtgcgtggttaaatcctcgggtttcaatggcgtaccccgtagcgccagatagtcggggctggcgcaatacacccgctcgatagcggcgatccgccgggcgatcagggtggagtcttccagggtgccgatgcgcagcaccaggtcgtagccttcgccgatcaagtccaccggcctgtcgctcaggtcgacttcaacgcagacctgtggatgctgacgcaaaaacaacggcagcaggcaacccaggtgcgccatggcgaacgacaagggcgcactgaggcgaatggtgccgcgcggctcgctgttctggccggcgatgccctgctccacctgctccacctcaccgagcaggcgcaaggccgactcgtagtaactctggcccagcggcgtgacgtccaggcgccgtgtggagcggttgagcaggcgcacgcccaggcggtcttccagttggatcaggcggcggctgacgaattgcttggacaagcccaattgctcggcggcggcggtaaaactgccggactccatgacctggcagaacaggcgcatgtcttcgaaagggttcattgtcgcttctcaggggacgatgggctgttttatagcctgtcagtgatcacaccacaaaccaaatgtgaacccaatcaaatgtgggagctggcttgcctgcgatggcggtgtatcagccagcaatgctgttgactggtataccgccatcgcaggcaagccagctcccacagggtcttgcggtgttttacagagcaggttacttggcagcgaacgccgagtagctgttcatcaggttgcggtagttgggaatgcgcggcgagagcaggttggccaggccttccatgtcgttgcgccagtccacttgcagctcgcaggccacggagaaccagttgaccagttgcgcaccggcggcggtcatgcgtgcccaggcggcttgttgcacggtttcgttgaaggtgccagaagcgtcggtgaccacgaaaacctcaaagccttcgtcaagggcacacagggtcgggaatgccacgcacacatcggtcactacaccggcaatgatgatctgcttgcggccggtcgccttgacggccttgacgaagtcttcgttgtcccatgcgttgatctggccagggcgcgggatgtatggcgcgtcggggaacagttctttgagctcaggcaccagcgggccgttggggccgctttcaaagctggtggtcaggatggtcggcaggttgaagaacttcgccacgtcggccagggccagcacgttgttcttgaactcgttgggggagaaatcctgcaccagggagatcaggccggtctggtgatcaaccaacagcacaacagcatcatctttgttcaagcgcttgtaagtcatgggtaactcctttggggatgggggtgttcttcaaaaggcaaagcaggagcagccgaacgcaccccagaaaccctggaagtcgctgaccggcacgctggaaaggcgcgctttttcatggctgtgggcatgcacgccgcaaggtccgctgcactggtgaacctgggcctgcatcggcgacgtcgggcgccagtgccctggcaccttgaccactggcgaccagtcgggcagcaccggtacccgtggcggtgcgaaatcttcgaagtcgccagcgccgtacacgaccttgccgccgaccactgtcagtaccgactcgatccacttgatggcttcttcttcgacactgaaaaagtccgccgacaacgcggcgacatccgccagttgaccgaccttgatctggcctttcttgccctgctcggacgagaaccaggcactgccgtgggtgaacagttccaacgcggtaaggcgcggcaagccctcggcgtgcaactccaggccaccgacggtgcggccgctgaccatccagtacagcgaggtccaagggttgtagctcgacacgcgggtggcatcggtgcccgcccctaccggcacgccttcggccagcatgcgcttgatcggcggcgtggcttcggcagccttggcgccgtagcgctcgacaaagtattcgccctggaacgccatgcgatcctggatcgcaataccgccaccgagggcacgcacgcgttcgatgtttttcggcgtgatggtttcggcgtggtcgaagaaccacggcaagccattgaacgggatgtcgcggttgaccttctcgaacacgtcgagcatgcgcgagatggactcgtcgtaagtggcgtgcagacggaacggccagcgctgttccaccaggtggcgcaccaccggttccagctcctgctccatggtcagcggcaggtccgggcggggttcgaggaagtcttcgaaatccgcggccgagaacaccagcatctcgccggccccgttatggcgcaggtagtcatcgccctggtgcagggtgacgctgccggtccagttcttgaagtcgctgagctcttccttgggcttctgggtgaacaggttgtaggcgatgcgcaccgtcaactgttgatccttggccagttgctcgatcaccgcgtagtcatcggggtagttctggaagccgccgccggcatcgatggcgctggtcaggcccaggcgattgagttcacgcatgaactggcgggtggagttgacctggtattccaggggcagtttcgggcccttggccaaggtcgaatacaaaatcatcgcgttgggtcgcgccaccagcatgccggtggggttgccgttactgtcgcgcacgatctcaccgcccggcgggttcggcgtgtccttggtgtagcccgccacccgcagggcggcgcggttgagcaaggcgcggtcgtacaggtgcagtacgaacaccggggtgtccggggcggcctggttgagttcttccagggtaggcatgcgcttttcagcgaactggaattcgttccagccgcccaccacgcgcacccattgcggcgtgggcgtgcggtcggcctggtccttgagcatgcgcaaggcatcggccagggacggcacgccttcccaacgcagttcaaggttgtagttcaacccgccacgaatcaggtgcaagtgcgagtcgttgaggccgggaatcacggtgcggcccttgaggtcgataacctgggtgccgctgccgcgcagggccatggcttcgccgtcggtccccacggcgacaaagcgcccttggtggatggccacggcggtggcgcgtgggttttcccggtccacggtgtggaactggccattgaacagaatcagatcggcgttcatagggtttcctttacagaggcttcaagccagggagcgaacaggcgggtggccgccggcatcagcaggtacaccaccagcaacacgatggtcagggtgaccaggaaggtggagaccacgtaattggacaaaaacgggtgcaaccgcaggatcggcccccagataaacggcagcagcaaggtttgcggcaggatcacaaacaggctgaccaccgcctgcttccagcgcggcggcttggcaccgccctcggcctggggcgcgaaccagaattcattgaccgcgccgatttccgtctggtcgccgtccgccagcatcggcgcggcttcgtcgatcagcgcctggcgttgcggggagccgagccacagctcaagggcgctggtggagctatagcgcagcacgcaagtgaacagcgccatgccgttttgctggctgcgcaccacgtcaacacccaggtgcccagggcgttcgcccgcgatgcgcacgatgcggcgcaaccaggcttcgtactcgacttcaaagccgggtttgacccggtgcttgacgaccagggtgacgacttcgtcggggctggtgttgacggttgaatccatggctgagtgcttccccggagtattgagcgatggggagagtctggccgttgagcggtggggagaattggatgtatgtgctgtttggcttgttgcaggagcgagggggacgtctagttcttgctcgcgaagaacctcaacgataacgcgggcttactggttcaacgtggcgccctcaggtttttcgcgagcaagctcgctcctacaattaccggcaaagctacgtcgcccgggccatgtgttccgcaatcctgcccctcagccatcgctccgccgggtcgttgtcatgcaccccgctccacaccatcgacagctccgccgcatcaatcgcaaacggcgggtcctcggcgcgcaggcatgtgccttcggtcaacgcgcacgcggcgtaatcgggcacggtggcgataatctgcgtccccgctagcaatgcgcgtaacccgctgaattgcggcacggccagtaccacgcgacgcgagcggccgatgcgggccaggtccaggtcgatattgccgctcaggtcgccggagaacgacaccattgcgtggggcctggcgcagtaatcatccagggtcagcggcgcctcgccgtcatcgccgcgcaggaccttgcaggggatatcccgcagcttcttgcgcttggcattggccggcaggtcggtggtgtagctgacccccacggaaatttcaccgctggccagcagcgaaggcatcaacaggtaattggcgcggcgcaccaccacgatgatgcccggcgcttcttcgcgcaggcggctgagtaacgacggaaacagcccgaactccgcatcgtcggacaggccgatacgaaacactgcgcagctggtggaggggtcgaaatccttggcgcggctgacggcgcccgagatggtgtccatggccggttgcagctccttgagtatcgccagtgcacgcgccgtgggttccatggcacggccgttacgcagcagcaacgggtcgtcgaacaaatcgcgcaaacggcccaatgcggcgctcactgccggttggccgataaacagtttttcggcgactcgggtcaggtttttctcgaacatcaaggcttcaaaaatcaccagcaggttcatatcgacgcggcgcagatcgttgcggttcatgggcgctatccaaacgttttccagggggccagggaagcatgcactgcacgcccgggattgcatagctgtgctgtcttttccagcgccgcacctggcgaaattaacaacgattaactcgtcagccaggcggtccggcaacaagattaagggcgtctacactgcacccatccaccgggaacgttcccatcgactgcggatatttgtcatggcccgactcgagcaatatgccccccggttgcccgccaccggtggcctgtgcccccggcgtgagcgcatcgccaagcaactgatcctcgccaacctcggcgaaagcctggcgatcgccgacctggcccaggcctgcgccttgtcgcgcagccatttttcccgcgccttcaagtgcaccaccgggctgtcgccccaggaatggattcgccagcaacgcatccagcgggccaaggaactgattaccggctcgtccctgagcctcacgcagatcagcctcgaatgtggcttttgcgaccaggcgcacttctgccatatgttcacccgcagcgaaggcgtcaacccgatgacctggcgaaaccaccactcgcgcagcaaacctgatgtgatcgctgcctagtggtctgcgcgtacctggaatatgctggccgctctcctcatccagaacctgggcagccatgaatgacttgagcgaccaggccgtgcatttcggcccctaccgcatccacccgcgccagcgcctggtgctggaggccggtcgcccgctgcgcctggggcggcgggcggtggacattctgctgatcctgttggagcacgccggcaatgtggtgagcaagcaggagctgatcgcacgggtctggcccaaaagtgtggtggaagacggcaacctgcgggtgcacatggctgcgttgcgcaaagcactgggggacggccaggccgggcagcgctatatcgtcacggtcgcccagcgcggctacagttttgttgcgccactgagcattgaacccatgacgctgcccaccgacggcgcgccccaacgccccagccataacctgcccttgcgccgcacacgcatgatcggtcgccaagcgctgatcgacgctctggtgcaacaactgccgcagcaacgcttcatcaccctgaccggcgccggtggcatcggcaagaccaccgtcgccctgcgcgtcgcggaattgctgatcgggcattaccgcgacggtattcacctgctggacctggcgccgctcagtgccgcgtccatgatcctgcccaacctggccgccctgctcggcctgacaccgggcgagaatgcgtccctggccagcctcgcccgcagcctgcaggcacgccagatgctgctggtgatcgacaactgcgagcacctgctcgacgacatcgccctgatcagtgaaaccctgctgcgccatgcaccgcacctgcacatcctcaccaccagccgcgaagccctgcgcgccgaaggtgaatatgtgcagcgccttgaaccgctggcctgcccgcccgccaccggcaaccgcgcccaggccctgggttacccggccatgcaattgctgatcgagcgcgccatgtcccaccaggagagctttgccctcagcgacgctgaactgcccctggcgattgatatctgccagcgcctggacggcattcccctggcgatcgaactggtggccgcgcaaattgaacggtttggcttgccgggcctgctggtgcagatggaagacaactttcgcctgctgacccgcggccgacgcagtgccctgccccgccagcagaccctgcgcgccacgctcgactggagctttgacctgctcacggcgtgcgagcaaatctgcctgcgccgcctggcggtcttccgtggcggcttcagcctggtcagcgcagcggcggtgatcgccggggagcaagtggcccccgccgaagtgctgggctccattacgcaactggtggccaagtcgttgttgaacgtggaagcaagcgatgacgagatggtctatcgcctgctggacatcacccgcacctacgccctggaaaagctcagccaggcctgcgaactgcatgccacacgagagcgccacgctgcacgctgcctggcgctgatggaacaggcccagggcgactgggacctgatcgccacacagccgtggatcgaccgttatgcaccgctgcgcgaagacgtgcgtgccgccctcgactggggctttgctgacgacggtgcgcagctgctggctatccgcctgacggtcagcgcgatgccactgtggcaagagttgtcgttgctgcgtgagcacggcggctatgtggaccaggcgctggcgctgattggccaggttaccacgccctgcgcgcaattgaccctgcagctgcaattggccctgggcagcctctcctaccacgccatgggcgccgcacctcggaccattgcggcattcgagggtgccgcacgcctggccgagacaacccaggaccttggcggccagttgcgtgcggtctccgggttgatggcggtgaacctgtgtgccgggcgctacggcccagcgcaggagctgagcgtgcagttcgaacggctcgacccacacaccgagccgttgctgggccttagcgcgcagcggctgcgtgcgctgggccagcattacaccggcaaccagccgctcgcccggcaccacgccgagcaggtgttgcagcgcatgtcccaaagcggtcacgtgaaccgctttgccctcggggttggcgtgcaatacgaccagggtgtcgcctccttgaccgtgctggcgcggatcctgtggttgcagggctttcccgagcgcgcctggcgcaccgccagccaggcactggagttggccctgcagatcaaccacggcacctcgatctgctacaccctggccctggctggggtggtgatcgcccgctacaacggcgccgaagacgacgcccaagccctgcaacggctgctgctggagcaatcgcacaagcattcggtgcagttgttccagacctgggccgggcattacgccggtattcttggccacccggattggcaaggcctgggcctgatccaagacaccttgatcaccttcggcacccatgcggtggatgtgccaaccctggaacgcgcgcgcagtggcgcggcgggctggtgcgccccggagattctgcgggtgtacgccttgcagctagaggatgagcacgccgtcgaagcactgctactggaggcgctgggcctggcgcaccagcaaggtgccctggcctgggagctgcgctgcggcgaatccctggcgcaattatggcaacagcaggggcgcattcagctcgccagggacttgctcggttcaatccatgcacgcttcagcgaaggcttcgctacccaggatctactgcgcgtgcgctgcctgctcgacgagttgcaggacaaacggccggcctgagaacgcccccaggcaaggcgcgtagccttgctgcaaacgctcgacctggcgcgggtcgcgcagttgccccagggcgtagctgcgcacgcagttgagcaggcgatagcgcggctggcccaggccgggctcgacgctcagcagcgagacgttgaccaggcgtgccagcaggtaagacaggtcggcatgttcaagctccgtaccggccaccatgtcactcaggccaggtaaggtgaccgccatcttgaacaggctcaattgcagaaacagccagcactccggcaggctcaggcgctcgtagctccaatccagggccgcggtcagtgatcggtgacgttccaccgccgtgcgccgcccccgggccagcacttgcaaacccgtgcgtacttgcatctgcacaccgccgatgcccaacgcatccacctgggcggccgccaattccagagccaacggcaggccgtccaggcgccgacacaggtcgcgcagcggcgccaaatcctggggccgcaaatcaaacccctgctgattggcacgcgcgcgcgccacgaacagttgcaccgcaggacaggccatcgcctgttcgacattggccgacggcgacggcaccgccagccgaggcacgcgcaccacccactcgccaggggccagcaaggcttcgcggctggtgatcagcacactgacgccaggcgccgtctcgcccagcgcacgcagtagctgtcggcacgcgcccagcagcaggtcggcgccgtcgagtatcagcagtaactgacgcgaagccagacgccggcccagttcgttgaaactgtcgggcgtcgaatgcagctgcaaccccctggccaggctaccgagcaattcgctcggcgcttgcacaacggccatgtcgagccaccatacgccgtcgcgataacgcggcaatgcccgctcggccagggccagtgccagtgtgctcttgccaatgccggccacgccggtgagggtcaacaagcgctgcgcggccaaacgccgcgccagcacgcccaccagttcatcgcgcccccacaccgggctcagccgcgcagccaagttgtgctgaggcagcagcgtcggcagcgcatcttgcgccggtgcggcgaagcagtaaccgcgctgggggtgattgaggatccagcgttggccgtccagggcgcgacgcaatgcggcaatgtgcacgcgcaggttgctctcttcgacgacgctgttgggccacacccgctcgatcaaggtcgccttgctgatgaaatgcccgggcgcttcgagcagtaccgcaagaatatccaaggctcgcccgcccagcggtaccggccatccggccttgctgaccaggcgctgctgccgatgaaaggtgtaggggccaaagctcaccgccgtagcattttgcatgtccgtcacagcgctgaaacacccgtgcttgagtgcctgcgcatcctttttccatgggctcgacgctatcttgccagttggcgatgacaggacaatgctggcacggggagcgatacggacaatcgggtgcctgagacggacatgctgtcgttaactgaactgttgtcggtattgggtagggttcagcccgagcttttcgctgaacagaaaacgcatatgccgcacgctgccaaagccggcgtggaaggccacggtcttgagcggcaggtcggtggtttccagcaggtgccgggcccggtcgatgcgcgcgccttgcaggaacgccatgggcgtcatctgcacgtccttggcgaacagccgcgcaaagtggcgcgcgctcatgccggccagctcggccatggactcgatggtaaagggttgatccagatgcgccagcacgtggttctgcacgcgggtgatcggagtttcctgaggcgccacggcggcagtcatcgggctgaactgggcctggccgccctggcgtttcatcaccaccagcagcaccttggccacgtccaccgccacttgcttgccgtggtcctgggcgacgaccgacagggccaggtcgatacccgcagtgacgccgccagaggtgatcaggcgcccgtcctgcaaatagatgcggtcggtctcgacaatggcgttgggaaacgccttgatcaaccgctcggtgtagtgccaatgggtggtcacgcggtgcccgtcgagcaagcctgcgtggccgagcacaaaagcgccggtgcagatcgagccaaaacgccgagcccgtggcgccgcgactctcagccagggcaacagcgcggggtggcattcgttataggcgccggggccgccgggcaccagcagcaggtcataggccgcctgggcctgttccaacagcagatcggtctgcacgctcacgccgttggacgcccgcaacgggccgggctcggtgccgatggtcaggatctggtagtgatcggccgccggcaagtagcggttagcaatcgaaaacacttccagcggcccggccatgtcgagcagcaggaagtccgggaacagcgccatggccacggttttcataagcggggaatgtccatcgagaaggagtgcggcgggcattatggcacgactttaactgtcaacctgagagcgacagttattctattttcatcttcttaatcaatcactcgctaaccattaaccttcttctcaacgcaagcgccctgcatctcgcagcccgcgctcacttgaggactggaccatgctgacccttcgcaaagcttccgaacgcggcgccgccaatcacggttggttgaagtcgttccacaccttctcttttgccaactactggaaccccaaggagcagggtttttccgacctgctggtgatcaacgatgaccgcgtcgccgcaggcaaaggcttcggccagcacccgcaccgcgacatggaaattttctcctacgtgctcgaaggcgcgctggagcacaaggacaccctgggcaccggctcagtgatccgccccggcgatgtgcaactgatgagcgccggcagcggcgtggcccacagcgagttcaaccatagccagcggcatggcgtgcacttcctgcaaatctggatcgtgcccaacgaagccggcgccaaaccgcgctatcagcaagagcatttcactgaagcgcaaaaacgtgggcgcttgcagttgatcatctcgccggagggcgccaacggttcgctgagagtgcgccaggacgcacgggtgtacgccggcctgtttgacgctgacgaaagtacccgcctggaactggcgccggatcgctacgcctacgtccatgtggcgcgcggcagcgtggaactcaacggccagcgcttacaggagggcgacggtgtacgcgtacgggacgaacgccagatccgcctgagccatggcgaagacgccgaagtgctggtgtttgacctgcgccccaacgaactgccgcaaatgccatgacggccgcagtgatggtcccgccagcaggaccatcgttggcatcgatagtcaccatcagcgcaatgaagttctcttaaaaaatgcaacgcgtaacatcaaacccatgccaaacggcacccaactaaaacactcggagcacaccatcatgaaacgccaactcttgcttagcctcgctttctcggtactcgctgcaaacgcttttgcccacccggttgtcgctgaaggcggcgcggatcgcctgatagaaacccgcgttgccgaaggtggcgcggatcgcctgcaagaacgcggtctggctgaaggcggtgcggatcgcctgcaagaacgtggcctggctgaaggcggtgcggatcgcctgcaagaacgtggcctggctgaaggcggtgcggatcgcctgcaagaacgtggcctggctgaaggcggtgcggatcgcctgcaagaacgtggcctggctgaaggcggtgcggatcgcctgcaagaacgtggcctggctgaaggcggtgcggagcgcttgctgagcacccacgtataaccccgcactgttggcgggacaccccaaaccggcctgatcagccggttttttttcgtcttcaatttctatcacactgcccccccgtaaccacgatgcgaagcgagccgctcttgatcttgatctgcttttgatctcaggcgccccgttaaaccacgctggcnnnnnnnnnnnnnnnnnnnnnnnnnnnnnnnnnnnnnnnngactcggcgccgctcaacggcagcatcagcgccaggcacgcggcgaggatagacactgcgccgatcacgaacaggtgggggttgaggcgatgcaccaggctgaacaacaacgagccgatgatgccagcaccaccgaacaccagcaggatcagggtcacggcactgccgcccaggccggcgacgccttcgacgaaaggttcgatgtagctgtaggcggtgaattgggcggtgacggtcatcgccgtcagcacgtacagcgccaccagcgccggacgcttgaacaatagcggcaggctgcgcagggagccggagttctggctgggcagcagcggcaaggtgcgcgccagccagaacaccagcgcggcagcgaaggcggcgatcaccaggaaggtggtacgccaacccatggcctcgcccaacaggcggcccaagggaatgcccagcaccatcgccagggacgtaccggtggccaacaagccaagggcctgcacttgcttgccttccggcgccagacgtacggccagggaagccgtgatcgaccagaacaacgcgtgggccagggcgatgccgacccgactgaccatcagcaagccgaagctggtagccacgctggaaagaatatggctggcgataaacaggccgaacagcacgatcagcaatttgcgccgttcgacgttgcgggtcagcagcatcaccggcagcgaggtcagcgacacgatccacgcataaatggtgagcatcaggccgacgctggccacgggcatgtcaaagctggcgccaatggcgctgagcagcccgacggggacgaattcggtggtattgaacacaaacgcagccagcgcgagggcgatgaccggttgccagttggcttggggggttgcggctgaaaggctcattgacgggcgcggtactctgacgatgatcaagcggccacccaggacaagcgccgccgccgagcattctataggtttctcgcaccgctgttgctgcggatcgtcgccccaaggcttatggcgaggtcatggtaatcacgtagttgcccgactgaatcagcttgccagcgctgtctaccagcacataacgctgatcgtaatagcgcccctcgccgctgtccgccaccagccgcacatggggtgcgtcgacgctggcaactggcgcgacgctgcgcacctcgatgcggctgccacgactggattgggcacagccacgcagttccatcaccgaaccgctgcgcgcatttgtcgcacaccctgactcgacaatcgcgccgctgaacctgatggtgccctgccccacggtttgtgcggcgccgcaggtacttgcccacaggcccaggaggccagtcagtaccgctacacgatgaacgttcatgccgacactccttcttgggttagttaagaagtaagtcgtcggcacgccggttaacttgagcttatttacccgccaatgagaggtgcgtcacggatccacctgccccatcaactcaggaatgctctccggccgctgggcatagcgttgggccaacgccgcgcagaccatcaactggatctggtgaaacagcatcaacggtaggatcaacacgcccatgcttgccccggcaaacagcacctgtgccatcggcacgccggtcgccaggcttttcttcgaaccacagaacaagatggtgatgcggtcctcctggttaaagccaaacgccttgcccagcagcgtagacgccaccagcaccagggccagcaacacgcagcaggccaccaccaacccgcccaattcccacagcgggatctggtgccagataccttcgttgaccgcctcgctgaaagccccgtagaccaccagcagaatcgaaccttgatcgacgaatttgagccaggctttgttacgcccgacccagcccccaatccagcggctggcgacttgcccggcaatgaacggcagcaacaactgcacgctgattttgacaatcgcatccactgtggagccgccatccccatgcacgttgagcagcagcgctaccagcagcggcgtcaggaagatgccgaacaggctggacgccgccgcgctgcagatggccgccgggatgttgccgcgggccagggaggtaaaggcaattgccgattgcacggtggccggcaaggcgcagaggtagagcatgcccatgtacagctcgttgccgatcaacggcgacagcagcggcttgagcgccaggcccagcagcgggaacagcacgaaggtcaggctgaacaccagcagatgcaggcgccagtggccggcaccggcgacgatggccttgcgcgacagcttggcgccatgcaggaaaaacagcagcgcgatggccaggttggtgacccagccgaacgccacggcagtctggccgctggcgggcagcagtgaggcgaggatcacggtggcgatgagggtgagggtgaagttgtcgggcagaaaccggggccgggtcataagcaattcttccaggggttgccaagagcgtcgcgacgactctaacgtaaccacctgttaccgactaacgccaatgagccagtaaatgccgcctaaaggacatgaaaaagccgttcgccgcagcgtacctgggctttccagcctgcctaggccggtgtacgggcgcactgaatccttgcccaatcgagcgctgacgcgacggcacagtcatccgtgggtgcagttgtcctacgcgatttccggggtactggagatccagaccagcgtcggccgtttcgtcgcaccaccccagcgcgcggtgtggatcccggccggcatgccccatcgggtgttcagttcgccccatacggaaatgcgcagcttgtacctcgactgcagcgtcaccgcctgggccgccgagcgttgccaagtgctggaggtgagcagtttgttgcgcgagttgatccgcaacttcagccaattgccggtcgaatataccgaggacggaccggacggacgcctggctcaagtactgctcgaccaactcgctgccgcgccccaggtggatttgatgttgccgctgcctcacgacccacggctgcggcagatctaccgcagcctcaacctgcatcccgagcagcaaaccacgttgggcgattggagccgcaagctggaggtgagtgaaaagaccctgagtcgggtgttcctgagtgacaccgggctgacatttcgcgcgtggcgccagcgcctgcgcctgttaagcgccctgcccgccctggaacaaggcgagcgggtgacggatgtggcattggggtgtggctatgagtcgacctcagcctttatcaacgcgtttcgtcagcagtttgattccacccccggtgaattcttccgctgaccctcccacgacgcaaataatccccaaacccacgctcggctggtattgtgccgcgctttgaaacacagcaaccgactgcgaggaaatggacgttgaacactgacgaaaaaatgaccggggacctgttcgaggttgataagcgcctgtcactcaagcccgtggtggacttcaacgcctacctgcgcagcgccttcggcgacggcccttgcacctgtgtgcgctgcacggccaacggtggcgatgaaagcggttatgagttccaacatacctttaccttcgagggtaagcccgtgcaccgccgcttcgcttcgacggcgggcagtgatgtattaatggcgttgaaaaaggcctggttgtcgtacaccaaggccgagctgccgctcagtggtgtgttggcgctggatacggtgaaggaattcgtcgagccgcagctgcacaaacgcctggcgccgctgtttgtcgccagtgggctggtcaaggatgtcgacggcgaactgcgcatccagccgcaagccgcagcctgacaccggctaatgtgggaaacaccactgtcgaagcaaagaagatccatgtgggagctggcttgcctgcgaaagcggtagtgcagtcacagatgcagtgactgtcgcaccgccatcgcaggcaagccagctcccacatttttccgggtattaatttagaaaccgggaacgccttgtacgcgcaactcagggttcagttcgtccagcggttcggtcagcggccggtcgctcccacccggcaggaggatcaccttgcggcactcctcctcggctttatcaaacagctcatagccccgcgccgcctgctccaggggcagccggtgagtgatgatcgcctccgggtgcagatgccccagctcgatatgctccaacaactcgggtaagaaccgctgcacatgggtctggcccatcttgaaggtcaggcccttgtcgaaggcatcgccgaacatgaagccatggataaacccggcatacaccccggcgacactgaccacgccaccgcgacgcacggcggcgatgcactggcgcagggccttgccgctgctaccttcgatcttgagggcggtgagcagggtttctgtagtgctgcccttggcctcgaaacccaccgcgtccaccacgccatcgacgccgcgcatgccggcagtttggcggatgatggtgtcagccgggtcatcgtcttcttcgaaattgatcggaatcacgccgtatgttttctgcgcgtaggccaaacgatacggatggtcgtcgaccatgaagatctgttcggcgcccagcatctgcgcgcatgccgcactgagaagacccacgggcccggcgccatagatggccacgctggagcctttgccgatgccagcgttggtcaccgcctgccaagcggtgggcagaatatcggagaggaacagcaccttctcatccgccagggtgccgggcaccttgaacggcccggtattggccttgggcacccgcacccattccgcctgaccgccgggaataccgccgtacaggcggctgtagccaaacagcgcggcccccggtgggatggcttttttattcaggatcgcaccgcgcccatcgttggtggtttcgcaggcggcgaattgctggagctggcagaaaaagcaatcgccacaggcaatcacgaacggaatcaccacacggtcgccgcgttgcaccgcggtgacggccgggccggtatcttcgacgatgcccatgaactcatggccgaagatatcgccgtgctccacggtcgggatcttgccccggtacaggtgcaggtccgagccacagatcgcggtggcggtgacccgcagaatgatgtcgtcgggttgttcaatgatcggatcgggcacggtatccacctgcaccttgtgtgcgccctggtaagtcatcgctcgcatgctctgcgctcctgccgttgaggggttactgattaagggcggagcaaccccctcagtgttccatcaacctcgatcaagacccgatcaatggtcgccgcgagtctgggccaacagcaggtcgactacctggcgcaagctggcaagcgcatcggcaccggtggcctgggcctgggcgtgccagcgcaactgctcagtcgcgctgttgccgcgttgcagcaaggcatccaaggtattgaacaacagcggctcgcccatggcctctgcggtggcggcaaaggtctgtcgggcgtattgcagccattgctcagcgctgcccagggtgccggtgtcgtccaacgcaaaggtaccagcggccccataacgcttggcctgccagcgattttccttgagcagccagcgcgcctcggcactgaacctggctccagggcgctgcatcgcgcaggcatgggtaaccattacccgaaacagcgtggcgagggccaaggcgtccgccagccgtgggcaggcgtcggtcatgcgcagttccagggtggggtaacgcgccgcggggcggatgccccaccagccattgccatcggccttgatcgcgccgatgcgctgcaacatgaccaggtagcgctggtactcggcccaatcgctgaagtgttccggcacgcccatgcggggccactcgtcgcacgcggcctggcggtagctcatgaagccgctgggcgcgccgtcccagaagggggacgagcaactgagcagcagcaacaacggcaaccacggcgacacctggttcatcaccgcgatgcggtccagcgtttgcggcacctgcacatgcacatgcagcccgcacaacacactgcgccgcgctacatactgaatatcgtcgaacagttgccggaaatgcgcctgatcggtcggccgctgcccacgccaatcggccagagggtggctgccggcgcacaccacaccgaggccgaactcagccagggattgcgccaggttgccgcgtactgcccgcaagtaatccgccgcttcggcgctggaggtgaacaccggtgaggccgcctcgatctgcccttggaacatctcataggagaagcctgcgccaatcgcttcgcggcaggccgccagcaccgctgccgagggctcgcacaccatctggcggctgtgcaggtcggtaatgaagtattcctcttcaatgccaaaggtgagcatcgacattcagcgcagtcgggtgacagtcagtgcgatcacggcaatgcgctccacctgctcatagcccggcttttccagttcttcaccgaagacgtccgggtccagttcgcggtaggtccagccgtaggcgtcgctgcccagcagcggcttgaccgcctccaggaagggatcgctgccggccaccatcgccaccccggtatacagcagcaggctaccgcccagggccaggcgcccgatggattcactgacgatgcgcagcgacaactgctcccccagggcgccaccgccatggcgataggcgcgctgacggtcatctttcatgtacggcgggttggcgacgatcaggtcgaactcgccctccacactggctaacacgtcactgtggtaaacgctgacgttattcagcccggccagctcggcattcaccgccgtcatgcgcagcgcgcgggggttgatgtccactgctagcacctgggcgtcatgcctggctttagcaatcaccagcgcgccgacaccggcgccacagccgatgtccacggcgcgcttgagcggctcgaaacgctgttgcaggtaggcttcgattacctgggcaaagcggtagctgtcggggccgaaaaacaccgcgtccgcctggtcggtgggataaggtgaatgggcgaacaacagctcatcgaggctcgaccaacgcaccgcgctgcgccatagcgcgccgtgtttttcgatcacatccgcctgttgcaactcttcacgcagggcctcgggcaacaggccttgatcgaacggcatcgaccacccgaacacatcgcgcagcgtcattgccagaggcgtcgccagccgccggtaaacacgctcgtgggtcaagggcgtcggtgtgataaagcgataaccgccctccttcaacccccggcccaaattcaacaaggcacggtcagccagttgttgcgcagacataggcacattccttagcgcaagcgcgcacgcagttggataaagcggcgagtggcatacagcccggcaggcgtgcagtgacggcgtgccgacagccatgggatcagcgcattgagctgttgcacatcgggcaggttgcacaacgactccgccagggcctgggtatccgggtccgctggtcgatgctgctcgcgggcaaaccggctgccgcgtcccggccgcacgggcggcacgcgttcgctggcaatccattcaccggcgatccaatcatggatcagctgtttttcataaccgctgaacaccccgaacatcgcggcgccagcgccctcgatgagttgccagaagcggctgttggcagggtcctggttgtgcttgatccagcctttgtcttccagggccttgaggaacgcgccgatctgcccaggcttggccagccattggttgacggtctggccttcgaagcggcagtagtccgaatgcatatgctggccgaaggcgcgcttgcgttcgagcatcgccaccacctggtcctgcaggttgaattgtttgatcacagacgtggtacccgcgcccagatcattcaggcggtagcctgcggccacccggcgatagaagtctgccctgccctcgcccagcggcaacaggttcagcaccgattgtgcggccttgcaggcgtggccactgctggcgttgtcgatggtgacatgcagcgtgaagtaataagggtcgatacccaactcactgagttcataggcggtgatcaacaggtgcagcggcagttgctcgtaacccaggttgaagccaatgacctccggcaggaactcgtcggcgcacacgccaagcgccagttgcagggcgccttgcaggtaatgatcatcctcaaggccggcttcgctgtcggcatcgtgttcgctgagcaacttgcggtagatcaccacatggttctgcgcggcttcaccgtcgcccaactcttccaggtaagtggtgagcaggccgtcgaagcgctggtcttgccaatagcgcagcaagccgtagagccaggcgccgtcgacctgtttggtgggcgccacgcactgcaggaaatacaacgcatgggccttgttctggaaataccgccgtggcccgccttgccggcgctgctcaaggtagtcggcataggcctgggccacctcggcgcagcgctgctcgacccaggccagcagctgttcgggcgcctctggcaagtcgcagtcggtggcttctaccagggccaattgatcgtgcaggtattcacgcgccagttcggtggcgtcttgggtttcgccatgcagctgttggtacacctgttgatggcggccctgggccgaatgggtgagagaggccggctggccagacagcgctgtaaggagtgtcatgatggcagtttccgcaaagtccgttacaacgggcctcccacaaggtggccccgcaagagcgctcaacatcacgcgcttctaaaatgcagagcctcggggcgtgcggaaaattcaaatgaggttgggttgggagggataagcggtcgtttgtaagggctcacaaaaccaaaatgcctgtaggagcgagcttgctcgcgaagaagccgcagacgccgcgtttattcagaaagcacgcgttatcgttgacgtttttcgcgagcaagctcgctcctacaggggttgagatggcgctgttacttacgcgccgcctcccactgcttgagcaggtcgttgtagttcacggtttcgcccttgggcttctcgttggccattttcggcttcggtgcgcccggctggtcgaaccagtattgcgcgtcacgctcggggttcattttcgggccgcacaccggttgcaccttggagcgttccaggcgcgtcatgatcgcgtcctgctccttggccaggttgtccagcgcctgttgcggggttttctcgccgctggctgcggcggcgatgttgctccaccacagttgcgccaggcgcgggtagtccggcacgttggtgcccgtcggcgaccactcggtgcgcgccgggctacggtagaactccaccagcccaccgagtttgggcgccatgtcggtcatggcctgggagttgatatccgactcacgaatcggcgtcaggccaacgatggtctttttcagcgatacggtttttgaggtcacgaactgcgcgtagagccaggccgcgagcttctgcttctcgggcgtggacttgaggaaggtccaggagcctacgtcctgatagcccttcttcatgcccttttcccaatacggcccgaccggcgacggcgccatgcgccatttcggcgtaccgtcggcattcaccactggcaggcccggcttgaccatgtcggcggtaaacgcggtgtaccagaagatctgctgggcgatgttgccctgggacggcaccgggccggattcagagaaggtcatgcccgccgcttccggtggcgcgtaggctttcatccagtccacgtatttctgcgtggcgaatacggctgccgggccgttggtgtcgccgccacgggtgacgctggagcccaccgggtggcagtcctccacacgaatgccccactcgtccaccggcaggccgttgggcaagcccttgtcgccgccgccggccatggagaaccaggcatcggtgaagcgccagcccagggacgggtctttcttgccgtaatccatgtgcccataaatgcgcttgccgtcgatttccttgacgtcttcgctgaagaacttggcgatgtcttcataagccgaccagttcaccggtacgcccaggtcgtagccgtatttttccttgaacttggccttcagctccgggcgctcgaaccagtcggcgcgaaaccagtagaggttggcgaactgctggtcgggcaactggtagatcttgccgtccggcgcggtggtgaaagacagcccgataaagtccttgaggtccagggtgggcgaggtgaaatccttgccttcgttggccatcaggtcggtgatggattcggtcttgccgtagcgaaagtgcgtaccgatcaagtcggaatcgttgacccagccgtcatagatgttcttgtcggattgcatctgggtttgcagcttctccaccacgtcgccttcctgcagcaggtcgtgggtcagcttgatgccggtgatttcactgaaggccttggccagcaccttggattcgtactcgtgggtggtgagggtttccgacaccacgttgatcttcatcccacggaacggctccgacgccttgataaaccacttcaactcctccaactgttgagcttcggtaagggtcgagggtttgaactcgctgccgatccatttttttgcggcatcttcatacgcatcggcccaggccgaagcgctcaaaccactgagggccagtacggcggccaatgaaatgctatgtcgcagcttattgtttttattcaacatagagacctccaggttagtttcaaaagggctatcggcaaccacctcccttgtaggagcgagcttgctcgcgaagaactcaaagacaccgcgggctaccaggaacactgcgttatcgttgacgattttcgcgagcaagctcgctcctacagggtcgtgtagacctagccccaacgcatcacactcaacagccataacagggagagcgcggacgccacccagatgctccagtcggtaacgccaatgaccagcaaatgcaggtaggcgctgccgagcagaccgataaacaagcgatcgccacgggtggtgctgatcggcagcaaaccgcgccgcgggatactcggcgaacgcaattcccaagtggtcatgcccgccagaatcagggcaataccgccaaagaacagcgctgtgggggtggtccaggccatccattccatcatcgactcctctagacccggcccagggcaaagcccttggccacatggttgcgaacaaaccagatcaccagcatgcccggcaggatggtcaacacccccgccgctgccagcacgccccaatcaatgccggaggccgacaccgtgcgggtcatcaccgctgcgatgggcttggcgttgaccgaggtgagcgtgcgcgccagcagcagttcgacccaggaaaacatgaaacagaaaaacgccgtgacgccgataccggagccaatcagcgggataaaaatcttcacgaagaacttgggaaaactatagccgtcgatgtaagcggtttcgtcgatttccttcggtacaccggacatgaagccttccaggatccataccgccaacggcacgttgaacaggcaatgggccagggccacggcgatgtgcgtgtcgaacaggccaatggatgaataaagctggaagaacggcagcaggaacaccgccggcggcgccatacggttggtgagcagccagaagaacaggtgcttgtcacccaggaagcggtagcgcgagaacgcataggctgccggtagcgccacgctgagcgaaatcaccgtattcaggctcacgtagtacagcgagttgaggtagccggtgtaccagcttgggtcggtgaagatcaccttgtagttggccagggtgaaatcctgcggaaacagggtcaggccgccgaggatttcggtgttgctcttgaaggacatgttcagcagccagtagatcggcaccagcaggaacaggatgtaaacgagtagtggaataagcttgcgcttgctcatgttggcggcctcagcggttggcgtcggaatgggtcatggcggtgtagaacagccaggacaccaacaggatgatcaggaaatacaccagggaaaacgccgccgccgggcccaggtcgaattggccgacggccatctgggtaagcgtctgactcaggaaggtggtggcgttacccggtccaccgccagtcagcacgaagggttcggtgtagatcatgaagctgtccatgaaacgcagcatcaccgcgatcagcagcacgcttttcatcttcggcaactggatatgtcggaacaccgcccaggccgatgcacgatcaatccgcgcggcctggtagtacacgtccggaatggcccttaagcctgagtagcacagcagtgctaccagcgaggtccaatgccacacatccatcaccagcacggtgacccaggcgtccatggtgttggcagcgtagttgtagctgatgcccagggcgttgagggtcgagcccagcaggccgatgtcggcacggccaaaaatctgccagatggtgccgaccacgttccacgggatcagcaacggaatggcgaggatgatcagcaccagcgaggaccagcggcccttggtgggcatggtcagcgcgatggcgatgcccaacgggatctcaatcaatagcacgcaggccgagtagatgaactggcgcagcagcgaatcgtgcaggcgcgggtcgagcagcacctgcttgtaccagtcggccccgacaaaatagcggctggactggtcgaaaatgtcctgcaccgaatagttgaccacggtcatcatcgggatcaccgcactgaacgccaccagcaggaacaccggcaacaccagccaccaggccttgttattctgcaccttgttcatggtgccacctccagcaggtaatcgtcggcgtagagcatcagccattgcgcggggaagctgatgcaagccttgccttccggcaccggcttgtcctcggccagccgcaccttgagggtggcgccatcgaggttgagggtcatgatcttgtaggtgccgaggtcctccacatggacgacgtcggcttgcagggcgtcagggttgtactcgtcccacacgtggataaattccggacggataccaacctggagctttttgtagtcggtggtgttgagacgctgctgcaacgcttcggacagcggcaacagggtattggcaaaccctacaccgccagacttggcctgcacctcgatcagattcatcccagggctaccgatgaaataaccgacaaaggtgtggctgggccgctcgaacaattcacgcggcgtaccgaactgcacgatctgcccgccgtacatcaccgcgatcttgtcggcgaacgtggaggcttccagttgatcgtgggtgacgtagaccatggtgatattgaactgctcgtgaatctgcttgagcttgcgccgcagtttccacttcaggtgcggatcgatcaccgtcagcggttcatcgaacagaatggccgacacgtcatcgcgcaccaggccacggcccatggagactttctgtttttcgtcggcggtgaggttacgggcttttttgctcagcaggttttgcaagtcgaggacttcggcgatctcctgcaccttgctgtgaattttcgcttcggccatgccctggttgcgcagcgggaacgccaggttgtcgaacaccgtcatggtgtcgtacaccaccgggaactggaacacctgggcgatattgcgcttttccggggtcaagtcgttgaccacttgggtatcgaacagtacctggccttcggacgggctgagcaggccggaaatgatattgagcagcgtggacttgccgcagcctgacggcccgagcaaggcgtaggcaccgccctgctcccacacatggttcatttcccggatggcgtagtcttctggccctgtaggcgtagggttgtagctatgggccaggttgcgcaaatggatctcggccatcaggcaaccctcgcgacacggcgcccgggggcctggaccaagcggccctgaccatcgaacacaaacagtttatgggtgggaatatacacgcggatcggcgcgtccacgtcgtattcatgcacccccggcaggtgcagcaccaacaggaagtgctcactgcgcacatgcaggaaggtttccgagccgctgatctcggcgacttccacggtcaccgccagctccaggtcatcatcgttgctgggcaccaggctgatatgactggggcgcacgccgaagcggaaatcgccttcgccgatgggccgcaggtcaacattgagtgggaaatgcacgaaattggcgaagctcacttcgttaccgctgatgcgccctggcatcaggttgatcggcggctcggagaacagctcagcggcgagcacggtttgcggctggtggtagacctcggcggccttgccgctctgaatcacccgcccctcgtgaagaatggtggtggtgccacccaaggccagggcttcgttgggctcggtggtggcatatatcgcgatggtgtggcgcgccttgaacagttcgcgcatttcctggcgcagctcttcgcgcagtttgtagtccaggttgaccagcggctcatcgaacagaatcagttcggcgtctttcaccagggcgcgggccatggcggtgcgttgctgctggccaccggacagctccagggggtggcgctgcaaaaatttctcgatgcgcagcatcttggcggtttccaacaccttgctctggatcacctcctgggacacaccggcctggcgcaacggcgaggcgatgttctcgaacacggtcatggtcgggtagttgatgaactgctggtaaaccatcgacacattgcgcaggcgcaccggcttttgcgtgacatccacgccgttcatcaggatgcggccgctgtcgggtttgtccaggccggccatcaggcgcatcaggctggtcttgcccgacagggtgcgaccgagcaggacgttgaaagaaccggcttcgaaccgcaggttggcgtcgtcgatccaggtttggccgtcgacaacgcgggagacatgttccagggtcaatgacatgacacgaccttttttattattggaatgaatctggtccgttgtcagagcgagtttcgtgccaaaaccgcaagcgcttgatgtgtaaggaaatgggtgaaccatgatgttcaggagtgaacaatccggctgaacaactgaacactgccggggttgacaatgaacagttgtgaacaacactttatgcgcgacgaagatcaaatgtgggagcggggttgcccgcgatggcggtgcatcagtttgtagatgctgtgcctgacccattgccatcgcgggcaaccccgctcccacattgttcgatgtctgacgttagatggcgcaagacccgacaacaataataaagaaggtcgcacgatggccgaacccttgacccacgacacccttattcaggaatcctggcgccgttgccgcgcctacggcctggaccaccagagcacccccagctttgaccaactgcccgccgagggcattcgccatctcctggaaagccagcattccctggtacagaccacccaccaggaagtgttgccctactacgagaacatcctcagtaattccaactgcctgatcatgctggccgacaatcagggccaggtgctgacctcttggggcacccagcggtttatcgagcccacgctggcccgaggcttcagccccggcgccagttggatggaacgcgccagcggcaccaacgccatcggcacagcgctggcctgcgcccaggccgtgcatattgaacacgatgaacacttcctcaaggccaaccgcttcatgaccggctccgcagcgccgattttcgacgcccagcgcgaaatcatcgccgtgctggacgtgtccagcgacagctacctgccgccctcccacaccctgggcatggtcaagatgatgagccagaccgtggaaaaccggctgatcctcaacctgtttcgcggcgaacatttccaactgaccttcaacaccggcctgagcaacctcgacagccaatgggccggcctgctgatctttgatgaaagcggccaggtgctgtcggccaatcggcgtgcggataacctgctgggcatcagcctgtcgcgggtgatgatcgacagcctgttcaaggtgtcgctgctggagttgctcaaccagcccgaagggttgccgtttgcgttgcaggcggctgggcgtaaccgcttccagtgcctgttgaagcgccccaagcagatgccggtgcaggcccgggtgttcagccaaccgccgccgcccgcaccgacgtcgatcaacctccaaaccctgcattttggcgatgtgcgcgtggaaaaagccgtgcgccaggccgagcgcctgctggaaaaagacattccgttgctgattcacggcgagaccggcgtaggcaaagaggtgttcgtcaaagccctgcaccaggcaagttcccgcagccgacaggcgttgatcgcggtgaactgtgcggcgattcccgcagagctggtggaatcggaactgttcggctacgaaaaaggcgccttcaccggcgctaaccaaaaaggcagcatcggcctgatccgaaaggcggacaagggcacgttgtttctcgacgagatcggcgatatgccgctgcccacccaagcccgtctgttacgggtgctgcaagaacgctgtgtgcagccggtgggcagcagcgaggtgttctcggtggacttgcgcatcatctcggcgaccaaccgcgcactgcgcgagctggtgcaggccggacgctttcgcgaggacttgtactaccgcatcggcggcctgaccctggaattgccgccattgcgcgaacgtaccgacaagcaggcgctgttccagcaactgtggcagcaacaccgcgagccgacgcaatgggccgggctgagcgccgaggtgctggagttgttcgagcaacacccatggccagggaatttacgccaggtgagcagcgtgttgcaggtggcgttggcaatggccgaagagcagccgatccgcgcagagcacctgcccgatgatttttttgtggatttgcaggcaacggtaccgccgtccaaacctgagcacctggatgaacgccttgacctgagccagcgcctggaagccgtgggcgggaatatttcccacctggcgcgggagctgggggtgagccgcaacaccctgtacaagcgcctgcgccagcacgaaggctgatttaacgccaactccaggaaacgccggtgtagataccacgcccatcagcgggggtggagcgtgcagcgtccatgcctttgtcgtcgtagcccggcgtgacggtgttggcgtagcggcggttggtgaggttgcgcaggtcgacccaggcttgccagtcctgcttgggcgcgtcgtagccgaaggtggcgccaaaggtggtgtaggccgccgcgtagtaggaattggcgtagtccaccgccacccgtgaggcatgctcggtgttgaggctggtgtagaaacccgtcgggtggctgtagcgcagttgcgcctggtaatagtgcttgggaatgccgggcaaggtgttgtcgccgaaacggtcgtcgtcgcggtaatggaagtcgctgaaagtgtaggcctggcgcagatcgagcttaccgctgcgcccgccgtcccacagcgggctgagcaggctcagttccacaccctggtgcacggtggggctggcgttggattcggcgatgatggcgttgctgatggcggtctgcgcctgggtctccacggatagcagttcgtggcgaacctccgagcgatagagcgccagatcccattggccgagccaggcttcaccgcgcccgccgatttccagggttgtggcggtctgattacgcagctttacgccttcgcgctgcaaccccgtggccgccccactgcccggcccgaagtatttgttggaaccccagatcatcgaccacgcatgcggtggctctaccgagcggctcaggttgccgtagacctgcaactgcggagtgaagtcgtaacgcaggccaatgcgaggtgcataatcccaatcatgctgacttgtcggcgcctggccgtcgggataagtgacctgtgtttcgcggcgcgtgtagatcgcggcaaggccgctggtcagccacagatcctccaccagttccagctcgttgcctacatgcagcacggtatcggagcccaggtagctatagtcgcgggtcttggtgccaggggcataaatggcggtattgcccgcaggaatgcgaacatattccgacgccccattgttcggcatcgcctgggtggtacgcaggccgacggtggtggtgctggcatggccgaacaggctgtcctggcggatgtaattcagggtgccgctgatatcggtgtaagcaactttgaggcggttggtgccttcgcgcaggtccatcgggtaatcgtggtaagccagcccgacctcgacccgtgaattatcgtccaaccgcaaggtggtcttgttggcgatccaggtggagcccggttgcaggcgctttgaatcgcgggcggcattgaggctgttggcggcacgcggatcatggctgatctggtcacgcgtgagcctgccgggagaatcgttggtggtttcgcgataacgcaaatagaagcgcgtttccaggtccgggttaaagcgatagccaaaattggcagcgatgcccttgccggtaccagcgctttggtgctgataaccgtcggactccgaatcggtgaggctgatgtaatagtcggcgtcccccagcacttgccccgaactgacttcacgctgggtatagccgcgactgccgacctcatagcgcacttgcagcttgggtgcgtccaagccggtgcgggtgacgtaattgaccgcaccgcccaaggccaatgcaccctggtcgaagccgttggcgccacgcagcacctctacccggctttgccacagcgggtccttgagctcatagggcgtgccgcctgggccggtaagcggcaggccgtcgaacatctcgtacaggccggaggcatgggcaccgggcgcgcggttcaggcccgagccacgaatggacaccttcaccccttcgttattggccgccttggcgtacacaccggcctggtatttgaagacatcctcgttggtgctgacccgtccctgctgcacgttgttcatatcgatgtaattggtgccaccgggcacgcttttgagctgtgcctggacgatttctgcggcgctggcctcagccgtggtgacttcgaccggcgccaattgcaggccttcggcctgtaccagcgaactgagggtcaaggcggcaaaaataaacggggggtggcgcagcagcattgggggcaggtccttggaatccgggaacgtgccaggccaaacccaccacgcgaacagtgatgggaaggcaggcacgcccctcaggtcactccttaatgacggacagcggcgttttaaaaacaggatgaatcaggtttggccgtcaggcgttgccaaggcccgcatcaggtcatcggcatccgaccccggcgcaaagcgaaagccatacatttcgtcagtggcgagaatctcccccaaggtgtcgcgcaactgggcttccgtgggcgagtcacgcaataacttatgcgccggcagcaatatctcggcagatacgccctgggccgtcgcggcgtcaatcaccgcatagaggataaaccgcaagcgtatttcgcgatccgtgggccaaaccgtttttcgtttacccaagggagggcctcgtgtttaagaaaaatccgaggctattgcccgcaggcaagcgtttcaagccgcgagaggcaagataggccgcttcctacagcggaaagggaaacaccgcaccgattggtcgatgcgatgggccttattgcaccggcaggaaattcatcagcaacaggctttgtgcgtaattgaggccaatgcgccggtagcgctcatcgaggatttgggtaagcaggtccaaacgcgcgacgatcttgccgaactcaacggcaaaactgaggttactgccctcctccgatatttcattggaaaacaacagcaacacaccattggcatcctgacgctggctgagcaaccaagtggccttttcgatattgcgcgcggcgttgctgacaaactgcgggttgatcgagtcagtcacataaaactgcgtgcgcccaccgtgggcggtcacgagcatactgccaatcgcgtagataaacgcgccgacgcggtcgccgcgaaagtcagggctcaaggaataactcagggcagccaggtcacgccggtcacccagtgcgggcaagggttggcgattttcgatggcctggcggatttgccgggcggcggtcaccgcatccgggtagcccgattgacgccactggttggggttgcgcaggtagagcttgctcatcagcaagtagaggctttgcaggttgtcgcgcatgccgagtgtggccatgcggtcgacgctggtctggaagaactcatcaggcttgccatcgctgaactgcctggcgatatcgcggccctgttgttggctgcaacctgttgcgcagagcgcgaaaaccgcagcaagcagcagcggccatcgggaggtaaaaacagttgacgttcgatccatcggcaccgggtctgattctgttggccacctacgggagtcgggtggccgggacaggggtagatcagcaaaatggaaaaaagtgcagcggtgcgggccagataagcatcggactacagacgctgatctgacccgacacttgattccccggcgtgctagagcactaccgtcgcaagcatccccaaggcacccaggcagaacccgatcaacgcgccgcgccctggagcttcatgaaacagcgcccagaccaccacaggctccagcagcaataacgaagtgaccgagactaccgtgacaatccagatatcaccgacaaccacataccccagccaataggcacccaacagacaaagcccggcaaaacacatcaagaccacgggaagtacaaaggcctcccaggaaccactgccggcctgggccaacttggcggtcaccacctcactgtagattgcacaaaactcaccgaccaccatcaaccctagagcaaaaactccgagtaattctttggacatatcaaaaactccttcgtattcagcgcactgtttttcagctcccagtcggcagtgctgcagccgtcgtgagcgtcgttgccttgatacgaagtggttttgaaaaggcctgaattaccgaagtgcttgtccatgctcatgtccttcaaagggttgaggctcagcgatccaatacagtgcgtgctgatcatagaggcatcgtgaagccattcacaattatgcgatgccactacttaaggattacggttaattaaatgcgccgaaaaccgcaataaaaacccggcgctgggccgggttcattgatcgggaggtcttcaggtagcggggtgctcacttgctacggaatccgccgcgtctacatccgacatgtcctcctcgatcggggcctcgtcatccgggggtagcgggatatcgtcctcatcgcgcctcgggtcatgccccgtctcgttatcagtgttacgagtaaccgcttgctgggaaatgttgcctggggctttctcgttgatttccatactggctctccgtgtatcgctcggaatatccgcgcttaagattgagaggtagcaacggatggagagtgccggatgttagacgaatggtggttcgtctttgaacggtatgaatgcgacaaacagcatttgtttaattatcagcacactcaaaccccagaaacgcaaaagccccgctttcgcgaggctttcgtgtaaatcttggcgggaaaccagggattcgaaccctggagacgctattaacgtccgccggttttcaagacnnnnnnnnnnnnnnnnnnnnnnnnnnnnnnnnnnnnnnnnggcgaagttgttcattgtggattaggcgtgggggcgacctgtcaaacgccccccccaacccgttggcagctgatgttcccgcaatctgggatcggaaatacttctgtgcggataactgcttctgaccgactgctgcccttcgcggtaggcagcttaggatcccatacgactgcagggaagccagctaaacgatccgtccgatgatggattggacgtcgctctccccaaaagcgccactacccctgctttcgaggcattgagcggccttcctcgtagcaatttcttagcaagcaccaatttattacgccactgctatgcttagcccttttaggcggggtgacacacatggcaggggaatactcactcccagatttgcttgaacgaatgtacgagaatcagctggcgttggaagcagctctgatggagttggctctccaaagcgaaaagcaaggcatggatgaagttggtgacaacgtccgtggtgctctattcgtgatcggcgaaaatgctgggcacatcaagcagggcttggcgaagctacgaactaatcgtctctgacaaagcacaccccaattgtgtaggagtatgtgggggattttgggggatacgcccgtggttgcgggctgtgacgcccgccaaagacaggttgcataaatgcataatgggcattggatggcatagattggcgtatggtttgccccatttttgccccacgtctgggttcttaaacctgcttcatttcctgtgggtgccccaatgaagctaaaaatatagctagtcgaacagcgaacctagggggtgaccgccctatccagcatgccgtgttgacgtcctttacctttaagggtaaattcccccctgagtcggtagcgctgcccttagcggtgcatgagggaactccttcgctggcttacctaattcgttaaagaccgtgccgcatgcacggctctcatcatcaaaagtcgagcagcctgctcgactttttttttgccttccttttgcttgaggttgattgcatgcaccttctctacgttgacgaatcaggctcgccaagcgatccggaccagaatttctttatcctttccggcgtgtctatctttgagcgtaagacgcattgggttgaaacacagctaaatgaaattgtcgcaagatttagccctgacgacccttacgctttagagctgcatgggtcgccaatgcgttctgggaaaagcgaatggaagcattttcagaaggatgatcgtattcaagcgatcaaggactgtctgtcgattattgctgactcgaatgggaagatcagactgtttgctgcggtgatcgagcgtggagcgaatggcggtgatgatccaatccaaagctgctttgaacaagtagcctcccgtttcgacatgtacctacgtcgcctccatgcgcaaggggaccctcaacgtggaattgccattttcgataagtcgagcactgaaaaaagcatccagaaccttgctaggacttttaagcacgatggccattcattcggcaaaatcaaaaactttgctgaagtgccgttgtttttagattccaaagcgtccaggctgatccagcttgcggatttggtggctttctcaatctaccggcattatcaggcttgcgattcgcagttcttcgacatcataaaacactgcttcgatagcgtcggaggcaccgtgcacggcctgcatgtgcgccgaaagctccagcgtgttgaagttgccccaccgctgggatccgcgactattattactgaaaaagtcgaaacgatgcaggtagagattcgactacacgatagaggctgagtctttactatgctccttgcgagcctgtgtaacgcataaataaccgttaaccggctcacaagccacatatctccaatataagagatgaataagcaatggataaaatctctaaaggtatgggcacagtctcacagctgacggcagtatgtatcgttcttacctttatagtaggaatgcgatggcaagacggtttttataccgaacttggcttcccttggatgagtggttattcaaattacttagataccatcaaggctgggatagtacccatagagttgtttcttctggcaggagccgtcggatggttttccatttgggggttgtctaactggagatacgatgccgcaacgatgactctagttgtcttcgtgtttatattggctccgtttggagatctcgctgcttcactggttgaacaaaactcaacacctgaattttcaatctttaagagtcaataccagatatgcaccacaggcttcattctcggagggataataaaacttctttcaaacgaaaaaaccactcccagctttgaaagtgaggatagaaattttcaaataccaatctattctttgcttattctttgcacagtaatgatagggatatttgactccccaaaatccttaggagccgcagctgcacagagtgctatgcgcactggtttcagcaattactcctgggttaaggatggcaaaggagagcactggagtattatagggcagaaccaaggcaattttattctcgcgcggccactttacaaaaacaatacgatagaaattaaggttgccaataacacatctgagcttattatttatccgaccacccctatatcttccggaattattgacactacgagcacaataagcaatccgtaaaagggagcaaaggctatatgcaaggccttactggcaaaactatttacatgataccgaccataattgatcgagtttcgttgtgtagctctgactcatcatttcacgtctcatcccccagtccgggttggtaggtacgctggctgaccgcagcgtgcccctaccccaccgcccattgatctgatccaacacggtcataactcttgtggcttcggcaggttgcgatgcagcgaacagatcatctgtatattccccgtgctggcacaaattgagcaacatcacctcagccttgctgtacttgaagcctggccgaaataagcgctcaagcgcaccaacagccgcttgaatgagaaggcgcacgtcatcagtggggtacggcatatcaaccactaccccgttggcgtactttgcctcttcagggttgaacataccggtacggatgctcacacgcacctttttgcatagcgagttctgagcccgaagcttttcagaagctcgcatcatgtaggtggccaccgcctccctgataggaggcagctccgtaagccgttggccgaacatgcgactgcagcagatctcctgctttggcggatccggctcgtccagctccaagcaatgcgtgccgcccagctccctggctgtcttctcgatcacaacgctgaacttcttacggagcgtccatgggtccgccttagccaaatccattgcagacttgattcccatcgcatcgaggtgaagtttcatctttcggccaacgccccacacctccgccacgtccgtattacgcagcacccagtcccgcttaaccgggtcggtgatgttgaccacaccaccggtctgcgattgcaggcgcttcgcagtgtggtttgccagcttcgccaaggtctttgtatgagcgataccaacaccaacaggtatgccggtgcagcgaagtacctgggcgcggatctgccggcctaaggcatccaaaccaccgataccggtcagatcggcgaatgcctcgtcaatgctgtacacctcaactgccggcaccatcgcctcaatcagactcatgacgcgctcgctcatgtcgccatacagcgcatagtttgaggagaacgggacaatgccgtgttgcttgagcttgtgcttgatctggaaatacggctcgcccatcttgatgaacggcttggcgtcgtagctgcgagcaatgacacagccgtcgttattgctcagcaccacgatgggcaccttcgccaagtccggccggaatacccgctcgcaactggcatagaagctgttgcagtcgaccagcgcaaaggtcggttgctgcttagacatggctgcgcactgtgctggtgatcacaccccagattgacagctcatccccttcgagaacgtaacgcgccggatatttggggttctccgacagcaggaccacctcccggccgcgcttacatagacgcttgcagacgggctcattgttcagcagcgccaccaccacatgcccatgagcaggctcaatggcacggtccaccactgcgagatcaccttcgaagataccaatcccctgcatgctttccccggtgattgctaccaggtacacatgaggtgcgcggatattcagaacctcatccaatgagatgtgctgttcaatatgatccgctgccggcgatggaaaaccggctgggacctggaacgaacacataggcagcttcgcgcctgcctcagcgataggacctagaatggtgaagctcatgatgcggccttttacaggtactgtacgaatgtacagttaactttgtagaacgcttgcggtcaatttttctgtaggggatttcgacaggcggagaggtgcgtatgtgcggacgattcgtgcagtacgaagggatggcgatctttattgaagaactgagcccccagatagagctgttcagcggttacgacgctcagtctattgaccgctacaacgtcgccccgtcgacacgggtgcagatactgcacgcagcagagaatgggctgcatatcgatgcagtcaaatggggatgggcgccgttctgggccaagggcaagcgccccgatccgatcaacgcccgtgtagagacggtcactacgggaaagtttttcaagcaactttggccgaatggccgagccctggtgccgagtgaagggtggtatgagtgggttaaagaccctgacgatccgaagagaaagcagccctacttcattcgcctgaagagtcagaagcccatgttctttggcgcactcgcccaagttcatcctggcctggatccccacgacggtgatgggttcgtgatcatcaccgccgccagtgatcaaggcatggtggacatccacgaccgcaaacccttggtactgacacctgagcacgccagggaatggatcgaccccgacctcactccagcccgggccgaggaaatagcaaaggaatgttgccagcctgtggaggactttgagtggtatgccgttggcaaagcagtggggagtgtgaaaaaccaggggcctgacttactgctgccggtgcgatccaaggatgtttaatgctatcagaacagccctcccaatgcggctggctcccagttcatgaacaccagttcaccgctaacctcactctttccttgccgttgattggaagtggtgtatcgaatgtccaccatctcaaagtgaaacccatcaaacactcgccggatatcgggatgatcgttgatgctgaccatcaccttgcctttacagcgccgcataaagtcggccatgcgctcgtaattctcaaatggaaaatccacaccatagccggcggtctgccagtaaggtggatccatgtagtggaacgtatgggcacggtcgtagcgctcggcacattcaagccagcccaggttttcaacataagtgccggataaacgctgccatgctgcagacaggttttcctcgatccgcagaaggttaatggctgggccggtcgtagcagtgccgaacgtctgcccggtcactttgcccgcgaaggcatggtgctgcaggtaaaagaaacgggcggcgcgctggatgtcggtgagggtttccgggcgggtcatcttttgccactcgaacacctggcgggaactgagcgcccatttgaactggcggacgaattcttccagatggttctgcacgacgcggtacagcgtgaccaggtcgccattgatgtcattaagaacttcaacaggcgctgcctggggacgcatgaagtagagcgcggcgccgccggcaaagacttcaacgtagcaatcgtgtggcgggaagagcgggataaggcggtcggccaggcggcgtttgccgcccatccaagggacgatgggtgtagacataaaaaagcaagacctttgctgtatggataaacagtgctaggctcgctccgctttgtgcacgaagcaggagccttggctggacttgcagggacgatctgcggggaaggtggccgggttgatgttgacgcatcctgcccggccgctccttttacttcggtgtagaaacttcttttgcgtaagcctgacaggcccgcagggcgatcaatccacggtcgccggcatcggtgattccgataattcgttgagcatgcgttgggtcaagttgggctcttgtggtgccatgaaccacgcggccggtggcggtggtggctggcactgaacagctgccggtggtttcggtggcggcgagtacgactgacagccgcagatcagcagtagccaggcgatcacgcagacgagcctgcttgatttgctcatcggtcaattccttgtagtgggtttcgtctttgttctgcaggcggagctccagggcaaggcgcttgtcctgctctgaacgctgcagagcagcagaagcttgggatatttcgttgagggtgtccgcctgcagccgggcttgccgctccagcacgctgccataacgccactcctgagcagtccaggccaacgctgcagatcctgcggccgccaccactaacagcaagctgatagcggcgatacggaactgcgccgggatcagatcgaagagacgcataacaccgccctcgccctggcccacaactgcagccgatcctccaggccattaaggccgccgttaatccggcgagtgatcgtgttgaactggtcctgatccgcgagcgcattcagcccattcacggaccagaaccacgccgccgactctgccgcccattgcggctgctcgagcagctcgggagtgcgcaacaatcgctcatcgctgaacagtgccagactgcagcgcaggtagttatcgtgcccggttacctggatcaaccctcggccacgatagcgttgaccatcaccatctgcagctggggtattaccaagcttggcagccagagtgccggtatcgtatttactcaggtattgatccccgcccaattcgcggacgtactgcagttgaccggactcgtgaccaagctgcgctaggaaagcagcctggcgtttcggtgtattgatctgccgatgcgccattgccgcgttcagggcagatacaaaaacgcccgcttggcggcgggcgtttggcatgatgtgttgtagctgttgttcagtgatggtcataaaaactccggacaaaaaaataccgcactcaggcggcgatggattgcattacagcttctcgacgctcacgaccttgagcggcttcgtttccttctttttcttacccttggatttgcctttcttgccggcattgcactcgaccgtggtcgaccagccagattgggtaaacacctgctccaccgaatccgtcaggtattcgccatccagtccgaccttgaagccctgggcgttgatcagtcgctcggcaaaaatgtcagtccggccaggcatctcgaagcgcacgtcggcggtcgagcgattgaatgccgctaaccttgctctggctgctgattcagcagcagtcttgttcggatagatatgccgatccgtgtgcaccgccggcaagccgtccggggcgtcatcgttgtcgatggtgaccaccgccaatttgccgtcctttttgttctgatgcttagtcgccacggccttgtgcgaattgcgatcccctaagctgaactgccagcgactgagatcactgcgggtcagcgtgatcgcaccgaacgttttgccgctggctgtctgccctccctggcgcggtatcaccaacaacttgccatctgcgaccttggccgtgcagtcgtattgcttagccaggcgcgtgatgaaattaaagtcggactcgttgagctgatccacacgagcgaccttcgtcgccaccggacagcctgcctgccagccatttcgagccgcgatatcggccacgatcttcgacaacggcgcatcctcccagcttccgctgcggatagtcttaccactgccgcgcatatcgctggctttacccttgatcacaatcgtgtccggcgggccggaaacttcgaccgtgtcgaccgcgtaaagccctaggcgcatcaaagacgtttcggcatagcccaggtgaatctcgattgagctaccgcgccggggcaactgcacctggccgtcacggtcatcgatacgcaattcaaactcgtcggactccatacccggcttgtcagaagtcctaagtaacaacagccgatcattgatcttggacgtaatatcggcaccgtccgcaacgatacgaaaagtgggggtcatggttttttcccaaagaaaaacccgcacagggcgggctgaatacaaagtttcctttcgcttaacgcaacgggctgcaggcggtgccgttcggagtcagtcccacaagctaatcccttcctcggccggggctggcagatccggcagcaggatcaccacaccagcgcggaaaggctggggctcgtctgccaagccctgattggcatccagaactgcctcgacgctgccgttcaagtgcccataaacgttattgcatatgacatcgagcatgtccccgtcagacgttctgcatgtcgtcgccatagcgcgtgaactccagagtgaatacttgtttacgcgggataccgccgtgcagcagcgcgccctgctcctcgttgatcgacttcagacaccaggtgccaatcacctcgccataacccgtggtcagagtgagcggttgcagccgcccaccgatggtgcgtaacgtgtcaagctgcttgaggccacccttgaagccgggataaatcgtacctttgagtgtgagcttttcttcgcccatgcccacggcctgctgcgcagggcgccgcgatagccgctcctgtgaagcccagcggaattcggtcgagcgactcaattcgtcgaaggccgccgtatctaagttgaagtagtacggctgaatcttaggatccctgggctggatgatcagcaggtgcggaaatggcttcaccgcttccggtgccggcgtggcatccacggcaaatgcgctggtgggcacgatgtttgccaacgacggattgacctttccggcgaccttgttgatcgccgtcgcagcttttcccgcctgctccttcagcgcccccattcgctcctgcacttcggcggcgccccgtgtcgcacgactgtacacagccagcacctggccggccttggcctgtgccgcatccacgccgcgcatcacccgctggagcttggcaccgacagcaggccccacgaacgggatattttccagctcggccgctgcccccgttatctcccttattgcaccgttgaccggcccaagcatgccctcagcactacgtctaccagcctccccggcttcaaccaggtacttgaagcccgactgcatctgttccatataagccataggccctccttacaggtgcggttcgtcgtatagcttcgcggcgttttgcttcgccgcatcagccatcattaaccgcatgtgcggcatgaggtcttgcgccaagcgttgcgggtctttcacatccccttgcaccgtaaccggcatattcagcgagtactgaaactgctgatccactttggcggggacaggcttttccggctctttgggctggatcgctacagccgccggtttggtcggcgctgacacggctagtgagcgtgctacatcacccagtaccggcgcttgcggtgcaggcgccatcagcaatgcacccgaaccgtctgcccggttgaatgacttgcccatggcggccaagcttggaatggctgggcccggtcgaggcgccatcagcaacggcgccaccggtggcgcgggcttttcgtcctcccctccgaaccacgacttacctgcagcaccgcccagcgccgccccccccatgctgcctaagtaagcgcctaccagcccaccaatagcggtgccgatgataggcaccaccgagccaatagccgctcctgcagcagcaccggccatggtgccggcgagattgccagcggcagcgccataaccctcggccttttcgtccttggtcttagcattctcataggtgtcaaaggccatggcgccggcctcgatgagcgagccaccaggtattgccttggcggctttaccgatcttaccgaccgcttgcacaaccccgcccagtttcgctatcgccccgcttggaatagaaacaggtggaataagcggacgcgggaccggtaccgcaggccgtggcagcggtgggcgcggaaccggtgcagcaggcagtggcaccggcggacgcgggaccagtactgctggccgaggcagcggcggacgcggagccggcgctgcaggcagtggcaccgccgggcgcgggaccagtgctgctggccgtggcagcggcggacgcagagccagtgctgcaggccgtggtactggtggacgcggagccggtgctgcaggccgtggcaacgccggacgcggagccagtgctgcaggccgtggtaccggtggacgcggagccggtgctgcaggccgtggcaacgccggacgcggagccggcatccgagcacgcagcgaggtcggccgacgtcgcggaatattacgtcttgaaccgcgcccacgtcggcgggtttcacctggccccccaggtccccccatggcattcaagttaacgacgaacaccttttggacgccgtcgccattcgacgcagcatcgtcacctcccgcgctgtcatcgccagataccgcttctttagccagcgaaaccactttgaggccagtagcgacgatgcctaacttaccggtcttactctcatcctttccctcaccatcaaccgattcacccttgagagcggctactgccttgagcccagtctcaactaacgacagggccttgccggccttacctttcgcctcgccgccctttcctacgcccccagcgccatccttggagttggtcacaaagaccttttgcacttcgccggatttgccacccaacgatccccgcgcgacgttgagcaaacctttagcgattttgaacgaactgagcagccccttgagcgcgacaaaccctcccccgaccgccgcgatacccgtcaccacacctggcgcgctgtcagacagcgaggtaatgcccctggtgactttggtcagtccttgcgccacggtgtctgtaaccgggcgcagggcgtccccgacgctgcgcatggcgtcatccattgactgggccatttcggcccacttctgcgacgacgcctcacgtcgttcgctgaggttcttgtcgagaatgcccgttgcatcgcgcgaatcgtttttaagctggctgtacagcgccttgttctgcatataggcagagagcgcagcctttacctgcatgtcagcgaacaggtcaccggtgcgcagtgactcttccagcgaggccatcatggccttggctttctccgggtccgactccttgctgatcttcgccgtcgcctcagccatcgccgcagcgcgcttcggatccgtggcctgaatgtacttctgcgccagtgacatactggtttcaagggtggacataccgttttgcaaaccggtctgcatcgaccctttgtaatcaatacccgcctttgcatacgccttgacggtgtcgccagagccgattttgcccatccagttcttgagattgtttgccgcctcatcggcgccgcctgcagatttcatctgcacttgcagcatggcacccaactgtgtaaccgcatccatgccggtaatgccgaggctgcccatgttcgccaacagctcaggaaaccacttagccatgtcggccgcttcaaagctaccggcctgcccttggtaggcaatcgcttccagggcctgctgcatctgcctaggatctgtgatcttggcattctgacccagcgcgttgatcatcttcgctgtatcaacaccgctcgacccttgccccacgacgaatttggccgcgactggcgcatattccagggccttgctcaagtccatgccggcgccaaccaattggttaaccacatcggccacatcgttacgcgccatgcccgtgtagcgcgacgtatcaatgatcttgcgcgacatctcctgttcttgcggtttgttggcaatgccggccttgatcgcgatatcacgaacaatagccccaaaatccgcactgaccttggtcggaacagccagcatgcccacaccgacgacagcggcgccgaccgcacttttcacgccagtcttaccagcatcgatctgctgatgtcccttggctttgagctccgccttgatggctgtctgccccatagagcgataggctttctccagtcggccgacctcgattccctgttttttcaaactatcgaggttcgaattcaaccggcccaacaacttggtcgcgccctgtgatccgctgtcgtgggctttcttccactcgtcgcgcaggcgaatggtgtcaccgatagtgcgctgcaggacacgcgccttgttgccttccgcctcaagacgcttgatgcgccccgttacatctttaaacgcagcaccgacagtcgaactgacggcgccgccgatcaccagcccgagggcgattttgttcgccatgtcacggccctcatttggatagccttatcgaaggcggctcagtccgtgagccaccacaccatttctgcaaagggcatcgacaaaatctcagcagcggaaaatcctgtttccgctgccagacgtttcgcggccatctttatgacgtgagggttaaaccccgtcgtcttggtccaaacgaaaatagccggcctgcagacggttaaaatccaccagcttcaggccctccaggtccgtgacaggcgcaccggcaagcgcggcaaacaaaatcaattcccgctgttcgtcgtccccgcccgcgtcacgattagcagcgcgcacatcgcccactgtcggggagcgcagggccaaggtatcaaccgataccccattaatttcgcttgggcaggtcagagtgacctgggctcgatcagtgttgaccgacagccacggcggcattgattccgaatagtcggtatccggcaccaagtgtgcataagcggcttgaacacggcggtagtccgccagcttcaggccttcaagatccttaacacccacccctgccagaccagcaaacaacatcagctctcgctgttcttcgtcgccgttagaggcgcggtcggctgctcgtacttcccgtactagcggggcccgcagagtcaatgtttcgaccagaacgccattggcattgctaggtcgcgtgagcgttacgacggctgcaagcgcagtgagtgatagccaagtcggtactgctttggacgttgctttattcatttggatctattcccttagaggccgagtgcggtgcgcacttcaaggagttggtctttgccgtcgatcacctgaacaccggcgaccatgtcgatttcgtacatgaggcgcccgtcgatttcgagcttgtaataagcgaccgccacggcgtgcttgatctcggcggggtcacccgctttccagtcgcccagatcgagctctttgaggcgaccgcgtagggtggcaaccacagccgttacagcccctttctgccccttgaaggcaccccggaacgtcgcattgaaagcggtgccatcggccagaccgaagtacttcaacgactcacggcgcacgcccttggtaacaaaggacgcctccattttttccaggccttggtccatctcaatcgcaccggccatgccgccagcgcgatactcgtcagtcttggtggtcagcttgggcagcgtaaggctcggcacgtcaccggcgaagttgacgccgtcgacaaacaggttcgtgttaaacaaagtttgaggaatcattgactaggccccttaggctgcttcaagaacttcggtcatccactgatcggtgacttcgaaaaggaaattcgggttttctgccggcggcacgtcggtgaagcgaatgcgccaataaactttgccctgggcgatctggctggcagtgttcagctcggtgtccgggaatacctcaaaattaataatcgcgccctgggctttgaggtcgcgcatgaacgcatccagcccatccgtcacgtctttgacataggtcttggtgatcgagcggtcaacagcccatttatggccggcctgcacagcatccattaggatgaacagcgtgcgaacgcgcgtgacaaacgcccacttcggatcgctcgacagcgtgcggttaccccacaagcgatagccgtcgtcgcgaatgatcgtcgcgatattggcgttgttcagcaggttggcccggcacgtctcgtcgccgtccagatactcgacagctcgggtagtgccggtgataccggtgaactccttgttcgacggcgaggcccagaagccgtattcagcatcggtccaagcgaacaagcccgccgcccaagccgaggccggcgcatcaactgtcttgctggactcggtgtcccagtactgaacgcccggatcgaccatgaacaggttgcgactgccaaagttatcggcataaagcatcgctgcttcatccgtggtgccagggccatcaagaatgccgattgcccgcagcttctgcgccaggctatcaagcgcggtagcgaccgcctgagtggcagtgtgacctggcgcaatcaacagccgcggctgcgcgttgtacaggcttttgccatcgagcaaggcttgtaggccggtacgctgacccgaggccagaacgccgccaataatcgccgaggtttgcagcgccgcgtcttcgagcttcggcacgccgatggcaacgatcaccgccttggccttcgcgtagatcgctttacaagccctggtgatcgccgagtcggcaccgaaggcagcgatagcctcgcgctcggtggtgatcaacttgagttcgccggccttggcggtaccgccgccgagaacgcctggggtgaatgtgtcgcaaagtccgacaatggaagacgagggcaaggaaatagtgcgcgcacctgtcttgatatcagtcgtagtaacgccgtggaagaagctcataaagctaatgctccagaaacgaaaaagccccgcataagcgaggccgggagggtgtttgtgttacatgtggcgcaatgcaaaacaccccgacagtgcggggcgttattgaatttgctgctctatccattcaggtttatctggccggaactccgaggcgggaaatttgggggattgcggccagtcgcgcaaggcttgaacgtagtccaaaagttcacccgattgctcaacggttagagtggtaggccgcgcagaatccacctcgtcccgatgccgctccctgagccatttcacgcgctcaatttcagcatcacgccaagccctttcaggcattgccgggtcaacagtaaaaatcggctccggcttaccgccagcagccaaccatttttcgtaatcaacccaaaaccggtggcccttcggaactgtagctccactcggcagttgaatcaccgtatcgggatcagcagtcagtctgtatgtcatctcgactcctaaagttcagcatcagctgttgcgtggatgtagtaagcctgggaaggcaatgcaatatcgttgttatcaatagagacattgcgagtgcctacaaatatcgctcgggctgtcgagcctgaagtcacatcgtcaccagacctccactgccccggagccccgccaccgatcccacgataaagcttgatacttggaatggctcgcttctcgaccttgaattgccagcttgcaataggctggctcattgccgaaatctggcctgcaaatacaggcgacgttaaagaactgtaggggttcaccccatcagcaggcgctacaccttgcgcaaatgtcttttcaaaatatcgctgacacattgccagctcttgttggggaaaacgcggttcaaactctgtcgctgtagcgccgacttcaagttgcaccgaagccaatacaacggtgtgagcaactgaagccttagaaacaatgattagctcaatgtaatcgttgttgttgctacccttggtcttacctacgacggaagaaagattgaatgacactacatgctttttatattcacgggttacatcaatatcttgaaagtgatcaacatcggccgacacatttccgcctgttccaaacacctgacgcaagataacggtacaggtttgttcaaccgtggagttgaaataaaaggatgccgtcaacgtttgcccggcacccgtctccacgccttcaatgcgctgccgaatgttcgcgcctggcgcacccgccgtatagctgaccctcagcgcccattttgcgccattgaaaccactacccagcgtaaacggcgttttattccattgggcggtcactcctactggcacaaaaaccatccagcggtcagcagtgtaaagtgcgcttgctacagaaaccgatccaccctcgccgcgctgccaaatgtctaaattcccattaatcagcagatttttgcgatatacctggcttgggaatttctgatttgcactttcgatttgagccctgagagcttcagaattgacaacctttttagaccgatcatcgactggtgcggtaggtgcattctgtccgccgagccattgaaacactaacgcagacgtaccaagcaccaacgggccgtcactgacaaggtgccagatggtatcggcatttaacgtgccgcgctccaccgtcaccatcatgcccggcgttaccttgtcgctgctgtccgcgtcgaccgcacgcacccagctatcaggcccgaccacatacaggccgttatctttcgcctgcgcctgatctttaaccagcacccgcgaacccgccggcaccgcgaaaccgtcgatagcttgaacgcccgccaggaccactgggcccgtggttgcaactaatgccgaatgcttaaaatcaagcctgttgaccgcattcgccaccgagtcgtcaacatactttcgagtagcgtttacaacagccgaatctatcaacaacacaacattcgtagaacttgaaaccacaaagttcatccgtataacttgtgtcttaccagacccttgggctagcagcgacttataactgggcgcgcaattggctacggcaaccaaatctccgtcagaatcgaaaagccccaattcgcgaatccagaacccaccttcatccgccggaataatctgctcggctactaggatcccagggttagtcggatgaggctccaggctattcaatggagcccggcggcgctcattaatcagtgttttctgtgagcgatcagggatagggtcagtaccgttcgcgtcccctacagccatatgggtcagcttccaagttagcagccctgcatctgacttaacttgctttgcttcgccaaccgccgtcagtaacgcgaaaaacttcgaattagcatcaatcatgtgtatacgtccaaatggtctatggaatgttcgcgaccaggcaccccgacatagcagtcaaccgagataggttcaggcgcaggaggataaacttctatttcatctatggaacactctcgaatcccgtttccgataaaacctgtcacctcgatatcactaagtaccggcggataaacatcaataacttctccgtcagatatgcttgcgaaaatgtttatagcccctgtggattccaggctaatcgccagcccagtcaggtgacggctgacgggcttggcgtcatcgatcagccgctccagctcctgatacatttcctcagtgataccggtgtccagcaccccgacctttaacgcgaaggtgccagggatcccttcgggcctcatgttgaaccactcgataatctcgatgagatagcccagcggttcgaccactcggcgtaatgcgccgatggtgcccttgtgggcatggatgtaataagaggccttgatggcggcgcgtttggtcgcctcggtccatcggtaatcccagcgatccaccgaccacgcccatgccagatgcggcagcaaatgcaccgggcaggtatcagcgttgtagaggtcgcgaagcgggacaatcgttttctcgaaaaacgtagcctccatggcccgttcaagctgcgtactgttgatcggcaataggcttttcatgtcaagcagccagcgtcacggtgtagcccgtacagtacgctgcctgagctttggtcggggccaagtcctgccagccgaccagctcaacccgagagacgccggcaacgtgtaactgagcgtctacaccggaacgtgccacctcaacgccgagccgtttgcgcggattgatccaagctgccaatcgacttttcgcctcggctaaactggcatcagcttctgggcccgcgctggtcatgtgcaggatcgccttgatttggtagcggatcacctgggcgctctgaaccgtcaccctatcccccaccggccgcacatcgtcgtcattcagcgcagttgccaccgtggcgagcagctccggtgaagcctcgccctccccgtccaatcccagcaccgttaccgtcacgtagcaaggcgccgggctttcggccgtggcgtccgccaccagcccagaggcgttacgcgcatgcaggatgtagctgttacgcgggccggccgtggtcagtccctcataggccaactggatgcgctctcggaacgcatcgtcgtcttctttgacttctggaaccggcggaaaggccagcagatcctcagcttgaatgaccaggcgcttgagattgacgttggcccccaggtgatcgaggtcaccgcgtatggcgtgcgccagcaataccgctttgccagcgtcattgactcgggcgcggttgccgaccttgatgtaagcaccaacctccagcaccttaagcaccggatcgctctccagcgcagcagtccagttgccgcccatgtatccgcgaaagacgcccagtccctcctgaaaaacctcttcaaagtccagcggctccaacacggtcggcgccggtaacgacgacagatccacgatactcatacggccacctccagcgtgacgccgtcgcccaggtactgcccgacgatcttcaggttaatttgcccgctgataacggaaatgacgcgcacttgatccagcttcaatcgcggctcccagcgacccagtgcgcgagcgacctccgcctgtacggcgcttttccagccgtcagtaacaggcaagtcaacaaatcgccgcagcttgctgccgtaatccatccgatgccgccggctgcccaacggcgtacccaaaatgtccggaaccgattgccgcaagtgtgcgatgccggaaatgggctggccggtgtggcgatccattccgatcattctgattactccttcaattgctccagatctggatgcgctttcaagaacgcgaattggtcatcaccacatgcggtaactcgaccagcaacaacaggaagcgtcccgccgccgggtaggatcaatgtccgcgaggtgaaaaccttgtcgcgaaaaacacgcgctggtccgatggactcaaccgcgtcagcagtaacgggaaaacccaacggcgcaggcttcaacgccggaaccacagtggcctcggcagaatcgccatcagttctagacttactcataaggcaaactccagatatgaaaaagcccgcactgggcgggctgtgtgtcggttgaaattaatgcgtgtggtgattgctgttgccaccagcgtcgatgatcgcaccagcactggtaatgcctttcgtgacgtgtaacgccccgtcgatcaacaccgctgctttcagattgatgttgccggtggtcacgttcacggcgctgtccgtcacgaccacctctgtactggcaactttgatggcaaccgtaccgctcggcagggtgatgctgtagctcttggcctgccagtcgtaaatcagcgagccgccatcatcaaaccgccagacttccacatgatcccggttatccggtggcggacccgcgttgccatacaatcccggaatgaacgtgccctgtgacacgtcaccgctggcactgaccaatgtcccctgctcacccagagacggagccctccaatgcctggccttgccggcggcgatgctgtgccaacgcacccaggcgctagtccattcgccgtccgaaacccgacacatcggaggggaggcagccagatcgaccgccaccacaaagcaatccttgaccacccccgcaagcatgcggtcgtgctgggcagtgacatagccgctcacaagtcctccgctggaacaaagtcctctttgacgtcgttgttaaagccaaacaacagcatgccgggcggctgagcgggccaaggccactcttcagggccgagataaacctgctgcgtccattccaccagccaaacggtgtaaccatccaacactggctgggtccagtcctgtagtgcctgaacgaactctgccggctcgacttccagcccccaggtctgagctcggagtaggaccgcaagttgggtagccagctgcaccgcctgttgctgatgcagaggatagatcgggtcgacgacgatacgtgcctcgaacttacacaccaatgtggtttcacccgtgccgatatcggcaccgggctcgatctcggccagctccagaaagaccgccggtaaagcgatgcgatcctgaatgtccggccaggcacttaccgtctgaacccctggcagatggctcaccaggtgttgctcgaccgcccggtaaagctggtccaggctaaaaggttggtcagccattaaccgatcctcttcaagtatttctgtagttcgaagttgagctcctgctgcaggatctccaacagacgctcgtccgccttttgtacccagctttcaaagtgcggacgggcttgttccagagacaccttggctttcgctaatggaaaacgatttccattttccgcgacccatccagaacttgcaccgcgaccagcggataccgtgctgtctgggtaatcatcagcattgaagtgcttgctagcagtgcgaatccaaatgtctggcttgttgccgtagaccttcttgagaaacgcgccttgatagcgccgccccgccaccgacacaccgctgccggtttgccgcgcccggccgatccggctggactcgatggcattcaaaccaaaccacagcttgccgctcgatgccccgccggacaccgggtagctgcgcaaccgttgacgcaccgccgcgacagcaatgcgctcctgcctgctgacggcacgggcaatgtgcgtacgcaaccagcccaacgtcttgttgatcgcgcgtcggtgcgcagtagcagctgccttgggcaccaacttggcaaagtcctgaaacgcctgcaggtccgcggctgacgactggatagaaatcatcccgccgccggccgagggtttgacgtagctaccgatgctcatgggcgcaacctcaggatcaaggcgaccagaccgtcgccgctcggctccagctgcagcaagtcgtaatcgccgccgccgtccagggcgggtaagtcgatgctgaccaaaagcccgcgtttcaagccttccgaatcactgacgcggatctcaaaccgaggctcacgcaagccggtactgagcttgccgagcttcggctgcaaccagggcgcggcaaacataccaagcaccggctcttcgcggccctcgatcacggcgctgtcgccaagggtttcgaacaccacttcgtcgatgtcgtcgatcagatcgcggaaggccacgatcacatctccagcaggatctgcgcgcgaggccgcgtacacaggtgcagcgggttggactgggcttccccggcgacacccttgttgaaaggcagcggctcgatcttgctgtagtacgggatgccctgggtgttgaccgtttccatgtagtcggcaggtgcgaaggacgagatgtacaggtcagggacgccctcggggaccagcagtgccttgtcgtcatggacgaacgcaacgccagcaaccttgccgcgataccgctcccagacgatcccgccgaactcgaaagcttcacgggcatcgccacgcagagacgcggcctgcatggtgttgaggtaggtctccttgaccgacttgtggacgatcagcttgttccagaaattcttgccgcacaaagcgcgggagccgctgctggtgacgctacccagggcttcctcttgcatatccagcgcttcgccgcatttcacccgcagctcggtatctggactgttcaagcccatcggcagcttctggcgattcacgccgaaggatttataaatatccaacaggactgtcttgccatcggcgtccagcacctgcccgttcaacgcacccatacgctggaattcgtgggtggcatccagctgtcggcgggcctttgccaggcgcttgttgactacatcctgcacggcctgcagttcgctgcgggtaccgaaggcgcgaataccttggatctcatcggccttgatggtgaagcgctccggcagatgcacggtgttgaacgggatcaactgacgcttagtcgcgccgaccaccaggccagaagtaccacgttcacctgatggcaccagggccagagtgtcgccgtctttctcgatctgcacggtcagtgtgctgatgccctcttcgcggaaaaggccgaggctgctgatacggcccggcaggtattcctgttcattgattgcggcagtcaacgaggaaacgctgaacgcatcgtcttcaaaaatggcgatatcggccatgggggtacactccagaaacgaaaaatcccgcactcggcgggatggataaatgggataagcgtcttagcgcacgatcacgtgctggttgttgagggctttctcggcggcagggtcaaggccggtcaaatgcgcctcgctgacctcagccagccgcacgatggcacgaccgcgccggacaacatcggattcgcttaaaggcccgtagaggatcgccacggcgttttcggtgccgtcctcagctgtcgctttataaggcgcaaactcaccgctggctgtgaccaggccgaggatctggcccggttccagggcaggccctgccgctacgttgatcgcttcgcgggaaatgttgccagcgccttcggacagtaagaactcgcccgcgtgcatcgattcagttttcatgctcttactcctttcgaggttccgttctgcgccgcctgccggcttgcccagattgaatgactgtcgacctgtttggccttgatagtgggtgccggatcattgtcgagcggcagactgttgttgatttcaaaaccgccgccgctgcttaccagcttgtcgaacaggcgcgccctgacagcagcttcatccagaccggcagccagaaattcgccggtcagttccggcaatcgtgccgcgacacacaggccgtgcagcgctttcgccttggtcagcgccgcagtgactaccgcttcgctttccagcttcgtcgaagcgagtatcgggtccaccaggttgctgatgccagccgccgcacaccccttggtaaccatcaacgccaatccggcagcgtccaatacgggtgctggatccgcagggtttacaggatcagtcggctctacatccggctcttcgtccaactgagccagcaattcagccggggcgttctggaagcgttgcaacacgctgccctgcccgaggcaggctttcaccttcagcccgtcgcccacttcatcggccaagcccaaggccactgcttcgttggccgtcagccaggtttcggcgttaaccatgcgccgcagctcggcctcgtcgatgtccggcgctttggacttgtaggccgcaatgatcgcttccagcgtctggtccagcacgtcggcgacacgccgaaagtcctcggcatcaccgccggtaaaggtgtaggggttgtggatcatcagcatggcgttggccgcgatcaccacccggtgagcgccacacacggcaacactggccgcgctggccgccagcgcatcaatgcgcccggtacagcgctcgcccaagcgcgacagcgcgttgtgaatagccaggccgtcgaataggtcgccgccaatgctgttgaacgccacaacgaccggggaaacgccgtcatccatcgcccgcaggtcctgaacaaactggttagcgctgacaccccaggtgccgatctcaccgtatacaaagacctcaatggtttgctgctcggcttcaccgctggcctggaaggtgtaccaactcttatccgcgacttttacctgcttgccagccttgtcataaatgcgcgggatcgcttttttactcatggttgttccttgtcatctgtcggctcgatggcatcaagcgtggtgtagttgaggcccagatccgtggacctagcgaggtcagcggcgttttccgcgtcgatggtttcggcgtcgtagccgttgcgcagacacatctcgctgcgtgaaccgaagcccgcctgcacttccatccgccgcgcctgcacgtcctgcaccggctggatgtaggcccagccttgcggcacccaacgtgtgcgcaggtattcgcgccgacgttgcgcgtaatcctccagcaccagggcgccggacagcaccgccatgtccatccaggcagcacgcaccgggcgacacagctgatgcacatacacgccgaattgcagctgctccaggcggcgccggaactcgttgagtaccacccgcagcgcccggtcgttgacctcgcgcatgtcgccagtgaggatctcgtacggcgtgcccgaacccgccgccgcagccatcagctgctgacgcatgaagtccggatagttgttgccggcgtccggtggcttggagaactccacctcttcacctggccccagctcctgcatcgtgcctggctccagggccaccatcggtgtgaagccgtcgcggtcggtggtcagcagctgccccgttaccgggtcacgcggttggtgcccgctgtccggcgccggccgcttgatgaagccagcaaacaggtttgccacctcctggcgaaacagcaccgcgtcgtcgtagttgtccaggctgcgcagtcgtttcaataccggtgccagacgcggcacgccccgcagttgccctggctccatgggttcgaagatgtgcagcacctgcgtcgctggcacccgcaccaactggttgtatccggcgttcaatgacgacgaatcgcgtgggtgcgacaagtacatccagtacgccacacgcttgccggccgggttgaactcgatcccggcgcggatgacgttaccgtttttggccgtctcgaacttgtcatgtgggacaaactcaggggccagcgcctgcagctgcagcggcaccgctaaaccttcgctcgggctgcgcggccgcaaccgcacaaaacattcaccagcagtttcaactgtacgcgccaccagggcctgcatgccgtagaagtcggtcagctcgtccgcgtccgcctcatccacccagtcatcccacagctgctgcttgagtttgcgcagtgctgcgtcgtccgtggtcggcctgggcgtaatgcccgtgccgatcaggttgctgacgcgcttgtcgatgacgttgaaggcatacgggtcattgcgcaccgccgcccgcgagcgagcccgcaggttgcgcagtgccggggtgttgatgctgttgatgccgttgtcggtggcttcccaactggccgaacgtcggccctctccggcgccttcgtaactggccttgatgttcgacggcagcaagaatccattacgggttagcgtcggataatgtcgggccattagagtcctttgcctccatgcatgagccgaaccacgcgagagcgcggcccggcggcgttggtcagcgacgtgcggatctcgtcgcgggccttgagcagttcgtcgatggagcggtattccaccgtgcggtcgctgtagcgcactgtcttttcaccgcgtgcgatggcgcgctcgatggcttcgaggtgcttcggagtaaacgacatatcagcgtctcttcaggtaaccgctagtggaactgcggcgttgtgggggtgcagcgggtcgcggttgggcgaccggggcaacgggttgcggcgcaacttgcggtgtcgcggtagcctgtggggcaaccgttacacgctcagcagcgaccaccttttcatcgaacaaaccggcctgggccagcgagttacgcacccggtcccagtcatgttcctgataccggttgatgccgaggtaatgcgccatcgccaggcaatacaccatcaggtcgagggcttcgttgcgctcggccttgcccttgatccactcgatacgcttgtggccccgcacgtacttggcgaccttgcgctcggccacgcactgggcaaagaactcgtccggcaggtcgttggcaaagtgcagcgcacctgggccggactcgaacgggtaacggttgtagatccagtcctttgcggtgtcggtaccgacaaaccacagctcggcgccgcctcgttcggtctggcccttccaggtcacatcaaccatggacggccgttgagcgatcaccggcttaccgggcttgctcgcgcccttgatggcgaagatgttgcgccagcgacgtacgcggcagaactggtagacctcgtcggtgtggtggccgccggagtcgacggcgaccgcgagaatgcctaagccgacgccgcaggggtgccggtaccgctctttcagcagttcatccagcacagcccaggtgcgttcatccgaagggtcgcccgcgatcacacggtgatcaatgacccagcgctccatgccgacgccccagcccattgccatgaactccaggcggtcggcctgtacgtcaacagcgccggtgatcatcatcacggcggccggcatcgcgccaagggagtacccttcccggcgcgcccgctcgatcagcaccgatgccttggtctgctcttgcgcgctgtcccacaccttagccaggcgggtgttgtagaacacctgcatgggttcaaggtcgcccttggcctgggcctttttcgccttctcaaattgcttcgccagcgacttccagcccgtccaccccaacggtgagtacagcgcgttgaggtggaagccgacggtctcaccatcgcccttggcatgggcacgccactcgccacgggcgagcatatcgcccttgtggtgctcctcgatcagcacgtcgcagtcaggcccggcgcactcgtaatgcactacactgaagtcctgggagtaatgcagccgctcccactccagggtctgcatgtgcccgcaggtcgggcagggcacgtagtagtaacgctggtcgctaccctcgaacagatcgtcgatgcgcgaggcgcccttgatggtcggcgaactggagaagtagaacttggcattgcggccgaaggtactgccccgcgtttccgccagttcgatgggatcgccctcttcgcctacgtcgacctcccaacggtcgatctcatcgccgtacacatagcgcgccgacaactcggccaagttggccgcagagccggcggtggtgacgtacagcgagcctccctcgaactccttggtgtccatggtattgcgcgagtcccgagagcggctcgccgccacacgttcgcgcagcaccggggtggccttgatggtcttgcctatccgcgacgacacccgctttgccagacccaggctgggcagcagcgtgaggatgttcgacggcaccatgtgaatcaacgcgccgatccagttcaaggcgatctgggttttcatcagttgcgaggcaaccatggtgaccacgcgcttgcacgggtgagccggtgacaggcaacgcattggctcgcgtgcgtagggcgttcgcacggtgcgatatttccctggctcggcggcgccggtatcacgcgggatgcgcatgtactcgtcggcccactcgtccacccagaggctggggtctggacgcagcccacggaaatacgcctcacggtacacctcagcgccgtcaggtttttccgtctgcatgggttaactcatagtgatcagatcgcgttcaaggtcagccgaagacatgcgctcggcctcttccagggacagccgcagcgccttggtcaggtgctgctcaatctcccaagggtcggacatcgccgccagttctggggccaattgcgggggcatgctgagcaactgatcgcgcagcatgcgtccggcgttgtaggctccggtggtgaccgccttcatatccaccagcgagccctgcaccttgtgaaactcggcttcggccagctgggccaggtagtactcgcggtgtgcgcgggccttctggaagtcgggttgcccgctcttcgcgccagcaggctgcggcggcgcagccgtgttagtcggctcgaccatgggggacagttggctgtaaacatcacgctggagccggtcttgttggtgtcgagccgcgacggcagccttactggggtcggcggtttcgaggatcagcgcttctgttgccagcacgtcgaccttcttgccatccggcgacagcaccaggcggttgttgtctttcagccaggtgatgtagctcggcgtcctgccgatgcgaaccgcgaaggcgcttttagacaggaacagtggatccgtcataagccctccttttcaacggcttttcaatggaaacctttcaatttcaatggattgaatttcagtaagctggcagccctgccgctaacgctttcccgcgggtttcatgccccgtgtccctcgaatgccgccagggtccccggcgactttcggtacgccattctgaagcacccctctacaggccacgtattccgtggcctccagcgcatcatgcctgaccgctgcccgagggcggcacatcgcacacgcccaaccgcttggcggcccagcgttcatacagcccgatggcgacatcggcgccggccatcgcggtgagacatccaatgctccctgccgccaggaccgacatgcccgaagcgtgcagcaacatcatggtggaaagcccgcagacgacgcaggccccggatcgaaggagcaagcggcgaatcaaagaccagccacttacccccgctttgtcggctctccatgcctcgccggatatgccgccgaccagggacagcacgatcaccatccagatcggcatatcaataagcgcttgctgctcgttcgtcatcgccctaccccataaacgcaaaaacccggcgcaatggccgggttcagtgtggtggtgtgtcccgctgcttgcggtcgcacctatcgaagatgggtactttttacaggctgagtttcctggcagcaagcgagttttaatgccatggcgcaatacgggtgcaatacaggtatgacgcaggtgcaacgcagggacaatacattcaatcggctatcgctccttaatcgctgtcctacctgtcccattgctattgagtcaggtgggacagctgagagccccgcaaataaaggctctgtcccactgtcctattatttattctctttcttcacatatagagagtaaataaacaacacgcgtgcgcgaagcacgcgcgcgcattgacgctacgctcacatacgcgggatgggattttggtaggacagtgggacagcccgctaacggcgtggtctgtagctgtcccatcacattaaatgttggtgggacaaggtaggactgtgggacagcgtcacgcacaataccgacaagtatcatgcagcctgcttcatcagtaaaccggcaatgcagacatgcgcttcatgtagacgctcatagtaggttttacgacagcagccacagtgagtgatcttctgagccagaaagctctcgtggttgcagtaatgctcccgcaccaccaacgacagctgtggtggcaggtgtttgttgacgatcagctcaatgtccactgactcgtccaatagcactcgactaccgcgtgtcccccgtatcagttctcccttgcactccatcaacatggcgatcatgttgccgccacccgttccaccaccgccggggttcattggagagtgcaagtcctccgcccaaagcttcagcatttcatcgattcgcttaatcaaaacaaggctcctcgcttgcaacgtgttgcagtgaagaggtgttgccccagtccttgggtttcttgtaagcccagggccgtttaccgcttttcggtaaggctgggaggcggacacgtcgccagcccagtcgatgcatgatcgcgccgacacgaatttgttcaggcttaccccagtgccccaagtccaacctaagcgcctggctcaacacgtcgctgcccgacgtggtctcgccaatctggatatcctcaagccagctaaggatcggcccttcccattcatcaacgacgaaccgttgatcctgcgcctcggcaaacaacggtgcctctgcaggcgtaacccaccaaatgtctccagcctcataacagaacatcgcctcagcccagagctgatcgcgaatttcacggagctttgccaggtcaaccttggtacaagcgacaggccaataacgccggttgccggtggcgtccttgagatattcatcttggttggtggtacccacgaacacacactgacgtggcacgtcgttagttcgacgaccgtagctctcgcggtaggtatctgtggaggccgaaaagaactgctttgccttggtgctttctgccttgttgaagctatccagctcccccaactcaacgatccacttgccgcgaatggcctggaacccgtctttgtcacccagagcaaacggcgtatccataaaccactcgcctcccagaatgctcatggccgtggacttaccagccccctgggcaccctccagaatcatgaccgagtcagccttacaacccggcttcatcacccgagcaacggccgataagatccaacgtttgcccaccttcgtcgtgtaatcgctcggatgaacacccatcacatcggtcaaccatgtgtcgagccgtggtacgcggtcccattcgagcttttgcaagtagtcacgcaccggatgaaaggcatgatcgtgggcgacaacgctgaccgcctcgatcacatgggacgccttcacacgaaggttgtagtgctgtgccagccacttcatcacccgcacatcatcgatatcggcccagtcccccgcgccgccgccatagggtgcagatcgcaacttcaccagtttcgaactgaaagcgctgtagctgatgacgccagcccatcgctcatcgttaccaaggatcaattccacgttttgcatgtgcgcgatcagggagccattttcggtgcgggccagttggtccttccagccacccgctgcaggaggcctgaccaccgcaagcacctggcggcgtacggcctccaacccctcagcgacgtgcaggtcgttgaagtcagtccacttgatctcacgctcgccggagaacaccggggccacgacttgaccgccgacaaccagcgcggcgttgttggctttctcttcgccagggttccaagggtcaccgttggggcgcttggttttccagtcgtcatcgcgacagatgatcagcgggcagccaggaaaacgctcgcgcattgccttggagacaggcagcaggttgcccgcgtcgaaggcgatggcgacagtgagcgaagtcgccatgtgcaggcttgcgcccgtggcgtagccctcacacaccagcaccggttcgcctggctcagggtggggaccgatcaggtggaaagccccctcttttgacataccgggcggccagtactgcttatcccgaccggtgtcttcttgcttggccgggaagatcacctgcaggccgacgatctggtcgcgcacgttgcacatgggcaccaaaaatgcgccagtacgtggcgcataacgaaccttgaagcctacgatctgctttcgatccagataggcgctcttacccttttcgggcatgcgtttgaacaggccggcagcacggttggccgctcggcgtgatgcgttggccgcgatctcggcagcctttcgcttggcatcttcctggcgagcgcgcatgacttcgcgctcctcggagctcatgcgtccgggcttgaccttgattttttgggtatcgccagaacgccagtcaccgaagctgccgaagatcagcgtctcgtttttttcggtgcggtgttcgtggatgacgtaccagccgtttttttccttgcctttgtcctgggtggttttgcagcgggtgagcttgccgaataccaagggttgagcgggctcaagaccatagtccgcgaactgattgatcacatcatcgagcataacgggcagccctctgatcatcgacggtcttgcactcaatgcagagcgtgcaaccgggctgtgccaaacgacgggcctctgggatggggccgtcgcattcttcacagaacatcagcgaatgctgagacgtgttggatatcagtgccaggcgtgcagcgacggcctgatcgatgcgctcttgcaccaggtcatttgcgaagtcagcaatatcagccacgttccaccccacaagtcgtctggttgacgtagcgggcgcggttgtacatgcccaacaaaccctggataccacgaaacaccaactggcggatctcggccagctcacggtcatcgaccttgccgtcgccaatgtgcttggcccaggtttcggacaaatcggcaacctgccggaaaaacatggcgatacccgtggtcagggtctcaggcatgtcgttggtgtacgcctcagccagttcctgccagatcgtgtcgcccacaagggcatgcaccgcatcgagaatgcgccggtccttggtcagttcgaggatctcgccgaactcctggatgttgacggtgtgtgagggatgggtgggagacaacttgtgctgcagcgtggtggcattgcggccggtggtggcggcgattgctgcggcaccgccaggatagtcccgtgcggcgtggtacagggctaattcgagcgtcagtatttccttttgcgctcgatcaacacagcttaaagctactcggctcatggcattaatcctactaagttgccagtgccccgcgacgtgtagtggtgatacatttgccgcgtggcttgaaagggcccaaacgccggctagatcttagggatcgaaaccgacaccgtgccgaggcgaacaatccgttgctcacctctggcgcaacagctgcctaatctgtggtggaaaaggcagcaacccaagacatccgtgtcttggcagcgcgataaagggaggtggtttgcatgtggtgtgccctcctaccttcgtcgcgacccgacagcactgtggtggtgtgtgccgggaggaactgggcggccctagggtcgccttttttctatgcagcttttggaacatcaagctcaggaggaaatacatcatcgagcgtgcacgtagtccccaatttgttgagtgctaccgtaatggcccggcactcgtacaagccaggaattcgggtacccgactcgtaattactcagccgactctgagaccatcccaaagcaccagcaagtgccgtttgcttgattccactacggcttctgagggcagatatcctattcattagaaggttctcttcgtgatcctgggcgcagactaacaacggttcgttatttttacaacacgttaagtcgtaaataaattacacaaatcgtgatattttccacacatggaaactttaggtcagcgcctggcgcgctatagaaacgaagcgaatctcacgcagaagggcttggccgctgcctgcaattggcaaaacggccaagggcgtatcgcaaactatgaaaaagataagcgcgaacccagccttgcggatctgcgcatgctttctattgccttgaaaaaaccgatgatggatcttgtcgaaggcgacgacgatcaaacgagaagcacagcgccaaaaattgatgactacgcgctgattccgcaatatacagcgcacggctcagccggcaacgggcatctcaacgaccacgtggagatcaaaggcggactggttttcaggcgagactggctcgcccggatggccttgagggaaagaagcctgcatgtgatctacgctaaaggtcagagcatggaacccaccatctgtgacggcgatgtggtcctgctggatgaagcacagaaagaaccgagagaccgacgcatttacgccatgctcaaacctgacggagagctgatcatcaagcgcctggtgcagagcatgactggcggctggatcatacgcagcgataacgaagacaagcgtcagtacccagatgaagctgctagcgacaatgaaatcggccatctgaaaatcgtcgggcgcatcgtgtggcacggcggggcactctgacccaagccttcagttaggtgctactgagttgagattgaagaacgcataaatccctggctcagtgagatctcccagagctattgctgcaagcagcaacatgccaatgatgcaaatcttggctctccataccaggaccatccccccgatcacgccgggatagcgcttaaggtatctggcagcaatattcctgtattgcttgcctcctccgaatacacacaacaccactacaaatagaaaaaaccacgcaaacggctgtgggtgcgaaaattggagcgaggttgcagatagccctaccgcaaacaatccaggcacatcattcgcgaacctgaaatatcgctccgcaattgcttcgtccggatcaagctcaaacatttcccctcctaaaaaactcaataaattcaaatagaaccaaaagatacagctcgcatctttttgcgcaactcaaaacgatacgtccaaaacctcaaactaaaataacaattcgtgttgattcgttaaaaacattgtgtgatatttgcctaactcttccaccacagagcgaggcaacaccatgcacaccacagctaccttgcacgtccatccggccgctgcgacccccacccgcatatttgaaatccgccgcctagcgcaagatctcggttgcactttcatcatgtccaaacccaagctgaagcagcgcttcacacccgcccctttcgatccaaacggcggagggcacgcggcatgagcaagtacaaactcgacaaccgcaccctgaccttgctcaaggctcaggtaaacctaaccgaaaccttcaaccacctgctgcgtgccgaagttcagcgggaggccctagcgttccgcttgaacgttgagcgacgcaaagccgacacacacttcactgttgaactgggaagcgaacgccacacgctgaccctgaccaacagcaggaagatgcaccttaagcttgcggacttcattgaggagatcgtcaacgggccagcgagcccaagcgatccgtcgtctgtgccgcacgctgaccgccgctacggcgtcttcgaaattgaacacaaacagcgtgtgttcgacctggtgcaaaccggcggcgcgctgagcctcgacatgggttttgagcaacctattaacctggcaatccatcgcaacaaaacccgcaccggcatcaccaccatcatgagcatcggcgtcaagaagccattcagcaaatgcttcacggtgtgcggcagtgacgtggagatctactccatggtggccgaatccatcactcacctggcagccgtggcgactcccgccgcgcatgcagcttaggaggtcgcgatggaacgtagcctggataaagccgccaagtacttcggcctcacccgccccaaactgatcgcgctgatgcgtgacaagggcttgctcactgagcgcaacctcccggcgtttcctgtacgtgaccgggagtacctgcggatcaagaacggcaactggtaccacgagacggccggaatgcaatacagccagtcgacgaaggtccggcaagccggcatgccctggctggcaagtcaattgggcctcgaattgccagccatcccggcagacaaccgtgacgtggcctagggagtatgcccgccagatcgtcgccatgcacacacgcgaggagcgcaatgccgcgctcctcgaagtgccggagcatctgcgggacctgaccaaacgccactgcctgaatgcctggaatcacccctcacgtctcaaacgcaaggaggccgctgcccatgagcaacaacagtcagacaccgctacggctacaacccgcaccggatagcgcaaccgtcgagatgttgcaccaactcttcggcgacgtgcttatccccctggaaaagctgcgcgtgcattacttcaagaacctcaacgagaagaccttcaccgaggcgatcaacagcgggcgtattcaacttcctgtgacaaccttggaccacagcgtcaaggctatccggtatgcccacatcaaacacgtcgcagcactgatcgacatccgcgcttaccgagcggacgaagacatgccccggccacaaaacgattcaaccgagcaagaccagtaacccagacggctgccaccaccagccacgaaactaccaggagcacaccacatgactgcaatacaaatttgcgcactgatcagcatcgtaatcgccgccggtatcctctattgggtcgggtatcgaggcggcctcactgacggcaaaaatgatggctacgaagaaggctattccgacggctacgtcttgggccgggacgaagcttcagccgcatacgcagcctctatcaaagaaatgtcagatcaatgcatgcgaactgaactcctattgagccgggaaccgcaagaccgttacacacttctcgccattgccgaaaagctgaagctcgccgcagaaactttccgcgccgttagatccgaaagccaagcaactcaggcacttgccctacgtgaaaaagcactgaacatggctgcgctgatggatcgtttcgaactgaaggaggaagccgcatgaactggatcctcacatccactggcaagcgcttcgatctgttcgagcccgacgccgacatgatcgacccacgggacatctcgcactcgctggcccacctgtgccgcttcaacggccacaccctcgagttctacagcgtggcccaacacagctgcatcgtcgccgagcaggtgccggaagagtacaagcttgcggccttgctccacgatgccgccgaggcgtacgtgggtgacatgactcggccactcaagcagtggattagcgcttaccagcacttcgaggactgcatctggtggcgcatttgcgagcggttcgacatcgctccagaactccccgcctgcatctacaaggccgacttgattgcgctggcgaccgaacgccgagacctcattccaaccgatccggctatctgggattgcttggtcggcatcgaacccatggccgaaaccatccgcccttggcctgcagcagaagctcgacttacctatcaccagcgcctgatggaccaactcgctatcgaacaccggaggaaagcggcatgaagaaccaccaggacaacaccaacgccctgcccgctttgctccgcatagccaatggtggcgacacgctagaaacaaacagtctctgctgcgcagcagcaggcattactgctccttccagcgccactgccgaggcatatgtaccccacgaaaagctgcgcggggcagcgctcgctgatgcaacgctaaacgctcaggaacgcccgctcgcgcagcctgccgtggggtatacgcatcattcacgcactagaactttagaaactgaaattttctcggacgaagaactggccgaccttactggatacaagcagcgagcccatcaacggagatggctcaacgaccgcaattgggtattcgttgagagccgtggtggccgcccattggtcggacgcatgtacgctcgcatgaagcttggcatgaccaatccaacgtctgcagagcagagcacaccgccgccgcgaccagcttggacacctgacttctccagggtgaactgagatgcgacctcgaaacactgagaacagggacttaccgccgggaatggtgcggagaaagcgccctcgcaagaacggtaaagtgtgggttggttattactacagagactcaacgggtaaggaaatcccgcttgggggagacttgagcaaagcccgattgaagtgggcagagcttgagtccaaggaaaagccagccgatctgacgatgatgaaggggatctttgatcgatacgttcgcgacgtcattccgaaaaaaggcgagcgtacccagaaggataacctagccgagctcaaacaattgcggcccatgtttgacggggcgcccatcgactcaatcacaccagccaatatcgccggataccgcgacgcccgtacagccaaggtacgggccaacagggagatcgccctactctcccacgtgttcaacatggcgcgggaatggggcctgaccgagcgggagaatccgtgccagggcatccgcaagaacaaggaaacgccacgtgattactatgccaacggcgccgtttgggatgcggtctacgggatggctgagccggaactcaaggaagccatggacctgggctacctgacaggccagcgaccagcagacgtgatcgtcatgcgcagggacgacattgagggcgattacttcttggtcacgcaaggcaagacagggcttaagcttaggatcctgatgtacacagaggagggagaaaacagcttgggcaggttgattcgggaaattacggagaggaatgccggccacgtctcgaagtacctgctgataaacaggcacggaaagcgaatgacgaagggaatgctgcgcttgcgctgggacaaggcgcgggagaaagcttgtgccaaagcaatcgaagagggcgatccgctcctcgccgcgaagattggcggttttcagtttcgcgacatccgaccgaaagcagcatcggaaatcatcgatattggcgacgcaagcctgctactgggacacagtaagcaggagatcacaaagcgggtttacaggaggattggcgccactgctaaaccatcaaaataggcaaagtttcggaacgcctacccgaaagtttcggaacgcccctcaaaaaccgtagcgctccacccaaaccccgtaaacacgaaagccccgcaatcgcggggctttcgtgtaaatcttggcgggaaaccagggattcgaaccctggagacgctattaacgtccgccggttttcaagaccggtgcattcaaccactctgccaatttcccttgtgcatcacgggattatagtagcccatcccgtgtcagcgggcgccataatacccgaatgaaacacactgtcaaactctctgcatcgcttgttacaaggcgtctgttatgatctttgcgactgaacgtttcaaaactgaaggagtgtcgccatgcgcgaacagaattacgcagtgaatggcaacgcgcaggctgagcagcttgaagtcagccgcgtgttgcgcaacacctacggcttgctcgcccttaccctcgcattcagcggcgtgatggcttacgtggcccagcagatgcgcgtcggttacccgaatatctttgtcgtgttgatcggcttctacggtctgttcttcctgaccaacaagctacgtgactcggcctggggcctggtgtcggcgtttgccttgaccggtttcatgggctttatcctcggcccgatcctcaaccgctacctgggcatggccggcggtgctgaagtggtcagctcggcatttgccatgacggccctggtgtttggtggtctgtcggcctacgtgctgatcagccgtaaggacatgagcttcctgggtggcttcatcaccgcaggtttcttcgtgttgctggcggccgtggtggccagcatgttcttccagatcagcggcctgcaactggcgatcagcgcgggttttgtgctgttttcctcggtgtgcatcctgttccagaccagcgccatcatccacggcggtgagcgtaactacatcatggcgaccatcagcctgtatgtgtcgatctacaacctgttcatcagcctgttgcagatcttcggcatcatgagccgcgatgactgatcagcaagcgctataaaaaatgccccgtatcgcaagatacggggcattttcattttcaggcccgataaagctcagtactgattgggttccatctccaactcgaccttgaagcgcttgaagatatcttgctggatgcgtagcgccagctgggcaatctcctgcccggtggcagtgccgtaattgaccagcaccagcgcttgcagcttgtgcacgcccacatcgccctcccggaagcccttccaaccggccttgtcgatcagccaaccggcggcgagtttcatttggccgtcggcctgagggtaggccaccaggtccggatactggctttgcagttcagccgccagggcctgggacaccagtgggttcttgaagaagctgcccgcattgcccagctccgccgggtctggcagtttctcgcggcgaatgctgcaaatcgcgcggctcacatcgcttggcgtggcgtgggtgatgccctgcgcgaccaggcgctgttgcaccgggccgtagtcgagtttcaggtgagtggcgcggctgagggcaaagcgtacccgcaggatcagccaacgcccgacttcgtgcttgaacaggctgtcacggtaagcaaagttgcattcgtcgaggctgaagtcccgcagttcgcccgtctggcgatccagggcggtgagaccggcaaacacatccttgatctctacgccataggcaccgatattctgcatcggcgccgcaccgacagtgccggggatcagactgaggttttccaggccgcagaagccgtgttcaagggtccacagcacaaacggatgccaggcttcgcccgcttcggcttcgaccaccacgtgcgtgccatcgtcgctcagcacgcgaatgccttgggtcgccatacgcaacaccagcgccggaatatcctgggtcaacagtaaattgctgccgccaccgatcaccagcaacggcaccgcgtttgccgaggcataggcgatggcctcgcgcacgtcagcatcactgtgggcctcggcgaacaattgcgcgttcacatcgatgccaaagctgttgaatggcttgagcgatacctgcgcaagcacttgcaaggtcataaccgccccttcaattcgatcaccaataaatcacaggcgcgttcgatcaggtccaggacccgttcgaaaccttgctcaccttcatagtaagggtctggcacctcgtccacttcgccatcaaagcgacgcaggaacaaatccagctcggccttgccctgccctggctgcatggctttgaggttgcgcaggttactgtggtccatggccaggatcaggtcgtagcgggcaaagtcagcgcgggaaacttgctgggcacgctggctcgacaaatcataacctcgcgccagcgccgcacgctggctgcgctggtccggcgggttgccgacatgccattcgccggtaccggcagacgcaacctcaacctggcccgccaagccggcttcgcgcaatttatggcgcaagatgccttcagcggttggcgagcggcagatattgcccagacatacaaacagaacttccatcaggcgcccagcaggcgacggacgcgctcgaggtcttcctgagtgtcgacaccggctggcggtgcttccaaggcatcgcccacgtggatacgcacgccgtgccagagggcacgcagttgttccagggactcggtattctcgagccagcaagagccccaactgacgaagtcgtgcaggaaaccggcgcggtaagcatagatgccgatatggcggcgatatggcacgccctccggcaacacgtcgcgattcttggcaaaggcatcccgcgcccacggcaaggtggagcgactgaacgtcagtgccaggccgttgatgtcgctgaccactttcaccacgttcgggttgaacagcgtctcgatgtcttcgatcggttcggccagggtcgccatacgcgcctcgccatgggccgcgaggttggcagcgacctgatcgatgacacccggcggtatcaatggctcgtcaccctgcacgttcactacgatcgcgtcgggtgccagacccagctgagtggcgacttcggccaggcgatcagtgccggagttatggtcttcgcgggtcagtaccgcttcggcaccaaagcctttgcacgcctcgataatacgcgggtcatcggtggccactaccacgcgctcggcgctgcttttgcaggcttgctcccacaccagctgaaccatcggcttatcgccgatcatttgcaacggtttgcccggcaggcgcgtcgaggcatagcgcgaggggatgacaacggtaaaggcggtggtcatttatccaggcgctcatcggtggtcagggtacgggcttcgctttcgagcatgaccgggatgccatcacggatagggtaagccaggccggcacctttgctgatcagctcggttttgtcggcgctgagcttgagcgggcctttgcagatcgggcaagcgaggatatcgagcagtttggtgtccatgagtgtttcctggaaagaagcgttttaaggcaagagacggttgggcagcagacgcatcagctgcgtgtcgaaccaggcgacgaacgccggcgacggtaccgcatccaccgcaaggtaccaccagtcgggctgggcaaaggcgcggcacttcaccgcgtccttttcggtcatgaccagcggcaatgacggggtaaaactcaagacctcggcgctgtagggcgcgtggtcggcaaaagcatggggcagcggctgccagtgtagcgtttcaagggtattgaagaaacgttgcgggttaccgataccggccaccgcatgcacctgctggccctgcgggaaataggtgaccggctggcgctcgccgctgtgcaggttgaccagcgctgtgggctgcaggcgaaaggcaaaaccttcttcacggtccgagacggcaccgttatagagcaccgcatccacactgtgcaggcgctccaccggctcgcgcaacggcccggccggcaggcagcggcggttgccgaggccgcgggcggcatcgatcagcaccagttcaagatcgcgggccaggcggtaatgctgcaggccgtcatcggagaggatcaggtccagaggttcactggccagcagggcctttaccgcgcgactgcgatcggggtcaatcatcaaagggacgccactgcgctgcacgatcagcaagggttcatcaccggccacctcggcactgtggccggcctcgacccgccacggcaactgcggcggcttggcaccgtagcctcgactgaccacgcccacgcgcaagccgctgcggcggcagtgctcgatcaaccacaggatcaacggcgtcttgccggtgccgcctaccgtgatattgcccaccacgaccactggcaccggcgcttgataaatctcgccctcgcccgccacgaagcgcgcacgcttacgttgcaccacgcggcgatacagcgattccagtggccgcaacaatgccagtgccgggtggccctcgtaccaggccttgagtaagcgctcggacatggccatcagggcgggctcgccgcctcgacggtggtcatgcgcaaatggctgaaaccgagcttgccggcagcgtccatggcggtgatcacggattgatgcggagtcttgccatcggcgctgatggacagcggcaattgggtgtcgccgccggactccttttgcaaggcctccatcaggctggctaggtcgtttttctccagcaactggttattcaccgaaaacaccccttcggcgctgatggcgatgtccagttgcttgacctgctggtcttcggcaggcgagccgcttaccgcttcaggcaagtcgacacgcagctgggtttcgcgggtgaaggtggtggtcacgacaaaaaacagcagcaggataaacaccacgtcgatcaacgacgcgaggttgatatcgacattttcccgttgcttgcggcgaaatttcacgctttgccctcgaccaggtctacatcacggtcgccctgcaccacctctaccagcttgatggcttcctgttccatgccgaccaccagctcatcaatgcgccgctgcaggaaacggtggaagaacaccgaagggatacccaccatcaaacccgcggcggtggtgatcaaggccttggaaatgcccccggccagcaccgacgcgttggtggtcatacccgagcccgtgaacgcactgaagatatcgatcatgcccaggaccgtgccgagcaaacccagcaacggcgccatggcggcgatagtgccaagggcgttgatatagcgctccagctcatggatgacccgggcggccgcttcttcaatgcactctttcatgatctcgcgaccatgcttggaattggccaggccggcggcgaggatttcacccagtggcgaattggcacgcagctccttgagcttttgcttgtcgagctgcttgttcttgatccagccccagacctgccccagcaagtgctcgggggtgacgcgactggcgcgcagggtccacaggcgttcggcgacgatgccgagtgcgacgatggagctcagaatgatcggcaacatcatccagccgccggatttgaccaattcccacacagtgaatgtcccctcgaaaaagtgcgccactttaccatatagggtcaacagaggggttcaccggctacaggtccgtctgtcgcggttcgagacgttggtaacgcctgattacggtaacggttcgcgccagaaacgacgttggctgcgcgcaaccgtcgcaggcacaaacgcccccaggcgcaggcgcacggcgccctgttcggcgctgtcatacacccggctgcccagcgcttggtagcgtttcaggacctgcggatgaggatggccgaacgtattgctgcgcccgcgggaaatcaacaccgaggtgggcgccaaccgttgtacgaaaggccaggacgaagaactacggctgccgtggtgcggagcttgtagccagtcggtcggaaccgccagcggggatgccagaaacgcctgttcggcggcgcgatcaatgtcgccggtgagcagcaggcgttcgccattggcctcgacttgcagcacgcacgacctcggattgccctcaagcccacccgcccactgccacagctcaaacgacacgccgtcccactcccagcgctcgccgctggtacagggctgggtggcgagaaaggatggcaagccctcggtttcgccgcccaccacgcgtttgacgggcagcccccgagccaccgccgccgcaccaccggcgtgatcggcgtcggcatggctgagcagcatcatgtccaactgccctaccccgagttttttcaacgacggcaacacgacgcgcgcgccgaggtcgacaggccccgagcgcggcccggcatcgtagagcaaggtgtggtggcgggtacgcaggatcagtgcctgcccctggccgacatccagttgcagcacctctacctgtccgtggggcacccactcccggggcggaaaaacggccatcaacagcatgggccagcccaacacccggaacggcacccctttgggcagcagtaacaccactgcgcccatcaggctgaccagccaataccccagcggcacctcgggcggcacccacgccggcaactgcgcagccagcagcgccaggcccttgaacaatccgtccagcgcgccgccagccagccacagcacaccttcccccgccagcggcacccacaacaacgccgtgcccagcagcgccaagggcagcaccaccaggctgatccacggcacggcaaacagattggccaccggtgcgctgaggctgatgggcagacccagcaccagcaacaccggaaacaagcctatggcaatcaaccactggggccgggtccacgcctgccagacgctccacggccccaagcgcccgccgaacgccagcagcaacaccgcgaccgccgcaaacgaaagccagaaccccacctgcaggctggccaagggctccagcaccagcacgccattcagcgccagcagcaacggccaccacagccccaaatggcggaaacgcagacgccacagcaacaccaggccgaccatcacacaggcccgctgcaccggcacgccaaaccccgccagcaggccataacccaacgctgcgccaaaagccaggccgcacgcccacggcagccacggccaggttcggggccagcaaccatagcgcgccaataccgcgaccaagccgtagatcaagcccgccagcaagccgatgtgctgcccggaaatcaccagcagatgcaccgtgcccgtgtcctgcaacacctgccaatcctcaggtgccaggccggaaccgtcgcccaataccagcgccgccagccctgcctcgcggccttgggcatccaccgccatcaggcgctggcgaacagcatcgcgccaggcattgcgggcgggtgcgagacgctcaccgtcttttaccgttgcagtggcaccgatacgctgggccagcagccagacttcgtggtcaactccatgaaaattgagcaggcccgcaggccgcttgagtgtcaacgccaagcgccagcgttcgccactgttcaccactggcccgccgtgccaggacacgcggatacgtttgggcagccggaccttgcgcgaccggccgtcggccagttcaaagcgcacgcccgtaaccgtctgctggggcaagccgaccacatgcccctccacccagcgagtttgcccgtccagggccggctgcagccgatcatccagcgcccgctgcgcgctgagacaggcccaactcaagcccaccagaaagaacgccacgggataggaccgaaaaggcaacagcatcaaggccagcaccagcatggccaataacccggcaccaggcggcaacaccggcaaccaacgcaacgtcagcaaccccagcgccaacgccaacatccctgtcttcatggatcatccttttccagtgatccactcagtcttagccggctgaacgacagcgcctatgatgttttgtcacaaagtctgaattttctgtttatagaatccgggcatacttgcccctcgaattgacctggaccccatatgccccggcgcttattcaaacggtacatgcccgatcccagcagtatcagggaacacaagtcattacagtttcttggcacgctgctgcatgaccccaacctctggcatctgaaccggcactccgtggcgcgcgccatggcggtgggtttatttgcggcgtttatcccgattccgttgcagatgttgctcgccgcagtgctcgcgatctcggtgcgcggcaatatgcctattgccatcagcctggtgtggttgaccaaccccatcaccatgccggtggtgttcatctgcacctatatgaccggcgcctggctgatgaacgtgccgccacgcagcttgcccgataacctgacgtgggaatggatcagcggccagttgagcaccctgtggcagccattcttgctgggttcggtggtattgggggtggtattgggcgccctggcctactgcctgaccatggcgtactggcgctggtgggtagcgcaccagtggaaaaaacgcaaactgcgtaggcgctgagcgctaacgggccagcaaacgcaaatgcacccgcagaccctgcccggtgttttctgcccataagcgaccgccctggcgctgcacggcgttgcgggcaatgctcaggcccaggccgaaaccgccatcgccgggccgcgagccgtccaggcgggtaaagggcgcgaagatgcgctccaagtcaccctccacaatccccgacccctgatcctgcagccagatatgccaataatctccctcacggcagccgtcgagttgcacgcagccgcccttgggggagtggcgtatggcgttacgcaggatattttccagggcctgggccagtgcattcaggttgcctcgcacccaactgtccgccggtaacaggcacggcaagcgcgatgcgggccaaccgctttcaaaacacgtgttctcactcaatatgtcccataacgcctggagctgaatatcttcctggggcagtggcgtcgtttcgctgtcgagccaggccagttgcaggctgtcttccaccaggcgctgcatggcgtcgatttcccgacccaggcgttcgcgcagtttggccaggtcttgctcgctgtcgcaggctacccgcaggcggctcaagggtgtgcgcagttcatgggacatatcgcgcagcaactgctgctgcaaacgcacggtgccctgcaggcgttcggacatatggtcaaaggcgcggcccagctcgcccagttcatcctggcggctggtggcatcacgagacattcgcgtattgagttggtccgcacgccaggcgttggcctgctcgcgcaattgattgaggggcatgatcagcagccgataaaggccgatgcacagcaacagggtaaatagacctggaatcacaccattggtgaccactcgccagaacagctgatagcgcccaggcataaagcgctgcggcagctcgatcaccagcgaccccgcgccagggtcgaccggaaacggcaccttcatccagggcaaaccgatgacatgccggctgaccggccagtccaatccacgcaaaaacgtcaggcgctggctttccttgtcactcaagggggtgctgcccagggactgcaagtcgttaccgatcacgccaacccagatgctttcacgctcggccattcgctgcagccaaacgtccacgccagcactgccctgtgtgctccacgccagttcggcgccggcggcatagccagtgagaatctcccgcgacttctcggacaggtacgcgctctgctgctccatgtagcggccccacgaccaactgagccaaatcatcagcaaacagaaggcgatcaacaggcaagccagcttccagaacaacgagtgtttgccaggcagtcgctcaaagcccttcatcgtgaccgctcagcacgtagcccttgccccacacggtgcgcacttcccgctcgatgtaaccgatggccttgagcttgcggcggatctggctgacgtgcatatcgagactgcggtcatggggtgcgtaaccgcgctgcaacacctgctgatacaggaaggctttgctgaggacttcttcggtattgcggtgcagggtttccagcaggcggtattcgctgcgcgtgagcgcggcccactggtcctggcaggacacatcgcagcgctgatcatcaaagtgcagcacgcgggcatcttcgggtgccggggcacgcggcggctcgggtcggcggtccagggcaacgcggcgcaggatcgcttcaatacgcacgcacaattcaaccatgctgaacggcttgggcagatagtcgtccgcgcccaggcgaaagccgctgatgcgatcggcttcagcgcccagcgccgacatcaggatcaccggcatggcgtggctctggcgcaaatgggtgaggatcgacaaaccgtccagccctggcagcagaatgtccatcagcaccaggtcgaaggcctcggcgcgggccagttgcaggccctgctgaccgttccggcaccaggtcacctggaagccactgcggccaagctgctcgtgcacataggcgcccaacaccgggtcgtcttcgatagtcaggatactgggtaggccaactgctgcgggagtcattagcgtctgcaagtcattctcaatcactgattattcaagattaaacgttcacaggcaatcgccacccggcgccgaatggcccgaagattgccgtatgtcattaatttgcaagattccaggccgtgcaaatggctacactgcgcaggtggcgcgggccggatgccggcgtggatgattgataacaacgtggtagcaggagagtggcgtgcttagaagaatggggataaaaggccgcgtactgttgctgaccttattaccgactagcctgatggcgttgctgttgggcggctatttcacctggatgcagctctcggagttgcaaacccagatgctgcaacgcggcgaaatgatcgccgagcaattggcgccgttggtggcacctgccctcggtcataagaacaccgacctgctagagcgcatcgcgacccagtccctggagcagccggatgtgcgcgcggtgtcgttcctggcgccagaccgctcttccctggcccacgccggcccgaccatgctcaaccagccgcccaccggcaacagttcgcacctgttgcagcgcaccggcaacgacgccacccgctatttactgccggtgtttggccgccatcgcaacctggcgggcgagctgattccggatgaggccgaccgcctgctgggttgggtcgaagtggagctgtctcacaatggcatgttgctgcgtggctatcgcagcctgttcgccagcctgctgttgatcgccatcggcctgatgtgcaccgccgccctcgccctgcgtatcagccgcaccatcaattcgccgattggccagatcaagcaagcggtggcccaactcaaggacggcaacctggagacacgcttgccacccttgggcagccaggagttggaccagctcgcctcgggcatcaaccgcatggccgaaaccctgcaaaatgcccaggaagagctgcaacacagcatcgaccaggccaccgaagacgtgcgccagaacctggaaaccatcgagatccagaacatcgagctcgacctggcgcgcaaggaagccctggaggccagccgtatcaagtcggagttcctggccaacatgagccatgaaatccgcacgccgctcaacggcatcctcggttttactcacctattgcaaaaaagcgagctgtcgccgcgccagttggactacctgggcactatcgaaaaatctgcggataacctgctgggcatcatcaacgaaatcctcgatttctcgaagattgaagccggcaaactggtgctcgacagcgtgcctttcaacctgcgcgacttgctgcaagacaccttgaccatcctcgcccccgccgcccatgccaagcagctcgaactggtgagcctggtgtaccgcgacacgccgctggcgttggtgggcgacccgctgcggctcaagcagattctgaccaacctgatcagcaatgcgatcaagttcacccgcgaaggcaccattgtggcccgagcgatgattgaagatgaacaagaagacagcgtgcaattgcgcatcagcgtgcaagacaccggcatcggcctgtccaaccaggatgtgcgcgccctgttccaggcattcagccaggccgacaactcgctgtcgcgccagcccggcggcaccggtttgggcctggtgatttccaagcggttgatcgagcagatgggcggcgaaatcggcgtcgacagcacgccgggtgaaggctccgaattctggatcagcctgaacctgcccaaaacccgtgacgacgtcgaggacctgcccgccgcgccgctgctggggcggcgtgtggccgtgctggaaaaccacgaactggcgcgccaggccctgcaacatcagttggaagactgcggcctggaagtcacgcccttcaacaccctggaaagcctgaccaatggcatcaccagtgcgcaccagaccgaacaggccatcagcctggcggtgctgggtgtcacggccaatgacattccgcccgagcgcctcaaccaacacctgtgggaccttgaacacctgggctgcaaggtgctggtgctgtgcccgaccaccgagcagatgctgttcaaccaatcggtgcccaaccccaacagccaattgcaggccaagcccgcttgtacgcgcaagctgcgccgctcgctggccgatctgatcagcccgcgcccttcgcgcagcgaacccggtgagccgttgtccagccgtgcgccacgggtgctgtgcgtggacgacaacccggccaacctgctgctggtgcaaaccctgttggaagacatgggtgccaaggtgcaggcggtggaaagcggttacgcggcggtcgacgccgtgaagcaagaaactttcgatttggtgctgatggacgtgcaaatgcccggcatggatggccgccagagcaccgaggcgatccgccagtgggaaagcgaacgccacggcacgccgctgccggtggtagccctcacggcccatgccatggccaacgaaaaacgcgccctgctgcaaagcggcatggacgactacttgaccaagcccatcagcgagcggcaattggcccaggtggtcttgaaatggaccggcctggcgctgcgtaaccaaggcccggagcgcacccatgagggtgcagcccagggcgtgcagctcttggtactcgaccacgaagaaggcctgcgcctggccgccaacaaggccgacctggccgccgatatgctcgccatgctgctggcctccctggaggctgatcgcctggcgattaccgtcgcccgcgaagccaatgacaaccacgccttgatcgaacgcgtgcaccgcctgcacggcgccacgcgctattgtggcgtaccgcaattgcgggcggcctgccagcgcgccgaaaccctgctcaagcaggatgacgccaaggccatggctgcgctggatgaactggacatggcgattgcacggttggccagtgaagccagagtaagtgcctgaccgtccgactgtaggagcgagcttgctcgcgaaaaaccagagaacaccgcgttaaaccagaatgaacgcgttatcgttgacgtttttcgcgagcaagctcgctcctacaagtacgcatctattctgtcattgcagggagccttttcaatgcgcgtcattctcttcagcagccaaacctacgaccgcgagagtttcctcggcgaaccgctgccggccggtatcgaactgcagttccaaccggcacgcctgaacctcgataccgtggccctggccgaacaccacgaagtggtctgcgcctttatcaacgacgacctcagcgcccccgtgctggagcaactggccaagggcggaacgcgcctgattgccctgcgctcggcgggctacaaccatgtcgacttgcccgccgcccagcgcctgggcctgagtatcgtgcgcgtgcccgcctattcgccccacgcggtggccgaacacgcggtcgcgctgattctggcgctcaaccgccgtctgcaccgtgcctacaaccgcacccgcgacggtgatttcagcctgcacgggctcaccggtttcgatctggtcggcaaaacggtcggcgtggtcggcaccgggcagatcggcgcgaccttcgccaagatcatggccggcttcggctgccaactgctggcctacgaccccttccccaacccacaggtgcatgaacttggcgcccgctacgtaagcctgcctgaactgttggccgaggcgcagatcatcagcctgcactgcccgctgaccgccgacagcaaacacctgatcaatgcccgctcactggcgcagatgcagcccggtgcgatgctgatcaacaccgggcgcggtggcctggtcgatacgccggcactgatcgaagcgctcaagctgggccagttgggctacctggggctggacgtctacgaagaagaagctcaattgtttttcgaggaccgctcggacctgcccctgcaagatgacgtgctcgcccgcctgctgaccttccccaacgtgatcatcaccgcgcaccaggccttcctcacccgtgaggccctggcggcgattgccggcaccacattggccaacattgccgcgtgggccgatggccgggcgcagaacctggtcgagggatgatcagcggtcacataccaggctcatgataggccggcacccgtgataggatgccgcgcctatttggaggatccatggccgaacacgatttccgcttcagcttgctgagcccgcaacacaccctgatcgaatgccgcgccctggtgccgggccgttaccaggtcaccggcaacggtggttcgatcaaacatggcgacgtcctgatcgtcagcctgcgcggcagtaaaaccctgtcgatgcgcctgaccgtcgaaggtgacgcacgctactccatccgcccggcaggccagtgggtcgccatggcccaagggccgaagttcggcgaactggagattcacacctggaaggtcaactgcgacagctgcgacgccgtgctcgagtttgagttcgcggtagaaaccaagctgaccaaggcaccgttgcaaccggctgccaacgcgcgtatcaaagaactgggctgggccagcgaaggcgataaacaccgctgcccgaaatgccagcaggccgcgcaatgaaaggccgcctgctgctcgccgcaatcggagtaggcctggcaggctgcgccgccgatggcgccaagctcgagcgcgaccacagctacgtagtggaatggatcggtgagcggccgttgatggactacgcgcacctcaccgtcaccctgggcgccgatggccgcgcctatggcaatggcggctgtaaccactggtttgcgccgtacacggtcgaaggcgacaagctcagcttcggcccagtcggcagcacccgaaaaatgtgcgccgaggccctgatggagcaagaacatcgcttcttccaggccctgcaaggcgtgcagcgttgggacatctcgccgatcgagcagacgcggttctggccggccgaaggcaagccgatccgcttgtggctcgaagaaggctgatctaggcgcactctcctgtattaacgcggtgtcctctggttctgtgggagctggcttgcctgcgatgcggacgacgcggtgattcaggcacaccaagtcgataccttcgcaggcaagccagctcccacagttgaccgcgcccggccacacactccacgatgcgaagcgagccgcttttgatctgcttttgatctgcttttgatctcaggcgccccgttaaaccacgctggccggaattcgacagggatttggggggtaaaccggcagggatgccggtttagccgccccgcgccatggatggcgcgtggcggcggccccccaaatcactggcggattacgggcacaccgagcctaagcgaggtgccgagtggtggggcnnnnnnnnnnnnnnnnnnnnnnnnnnnnnnnnnnnnnnnnatctcaggcgccccgttaaaccacgctggccggaattcgacagggatttggggggtaaaccggcagggatgccggtttagccgccccgcgccatggatggcgcgtggcggcggccccccaaatcactggcggattacgggcacaccgagcctaagcgaggtgccgagtggtggggcaagagcgttttgcttacttttgcgcttttcaaaagtgagccgccgtcagggcggaaccctaggttgccgttacctacataacggatatgtacgcggtcaaatccaacatcccggtaggctgtcaggccgtcttcgcaggcaagccagctcccacatttggatcgcggtgcgtcagttagaacagcgtcggctatccggtcgtcacgggagcaagctcccacagttttagcctttcaaggccttgagcttggccaacaccccttccgccgtctgctcacccatcaactgctcacgcaccttgcccttgtcgtcgatgatgtaggtcaccggcaaggcctcgctgcgcggaatctcgaagatcccgtccgggttctgggccagcaccgtgaacttgatccccagcttgtcggtggcggccttcagttcttcaccctgcacattatcgaagttgacgccgaacaccccgacattctggcctttcaactgttctgccagggcattgagctcagggatttccgtgcggcacgggccacaccattcggcccagtagttgaccaccagccactgtttgtccaagcgttcggccgccactttctggccatattggtcaacgccgtaatcgttaccgcagccgctgagcagcagggttgtgatgatcgccaatgcaccgatcagtcgccttgtcatggggtattccttcgcaaaaatgaacgttggctgcggcctatcgcctcttacggtttaaggacaggcgccagcgcaggtagaatacccgccacattacgcaagatgcgacccgcacatgaccgatctgacgctttatcacaacccgcgctgctcgaaatcgcgcggtgcgctggaactgcttgaagcccgcggcctcaccccgaccgtggtgcgctacctggaaaccccgctgaatgccgcgcaaatcaaggccctgctgaaaaaacttggcattagcgcgcgccaactgctgcgcaccggtgaggacgaatacaaaaccctgaacctggccgacgccagcttgagcgaagcgcaactgatcgccgctatcgccgcccatcccaagctgatggagcgtcctatcctggaaactgccgacaaagccatcattggccgcccgcccgagaacgtgctggagatcctgccgtgactacgccctatgtgctggtgttgtattacagccgcaacggctcggtgagcgagatggctcggcagattgcccggggtatcgagcaaggcggcatggaagcacggttgcgcacggtgccggcgatttccaccgagtgcgaagcggtggcgccgagcattcccgacgagggtgcgctgtatgccagcctggacgacctgaagcactgctcgggcctggccctgggcagcccgacccggttcggcaacatggccgcgccgctcaagtacttcctcgatggcaccagcaacctgtggctcaccggcgcgttggtgggcaagccagccggcgtgttcacctccaccgccagcctgcatggcggccaggaaaccacgctgatgtcgatgctgctgccgctgctgcaccacggcatgctgatcaccggcctgccctacagcgaacaggccctgctcgacacccagggcggcggcacgccgtatggcgccagccaccattccgggccagacggcaagcgcatgctcgaccaacatgaaataaccctgtgccgggccctgggcctgcgcctggccaagaccgccacgctgctggagaacggccgtggccaggaagcctaaggtcctgccgccacgggagtggctggagccgcgggtcaaggtggcacgcgcgctgagcctgctggcgtttttgggcctggtgggcttgctgtgtggctattacctgtttgtcgccgacctgcatggggcgcgcccgtgggtcatcctgctgatcgaactggtgccgctgctgatactcgcgccaggcatgctgatgggcagcgcacgcgggcattcgtggatgtgttttgtggtgaacctgtatttcatcaagggcgcgctggccgcgtatgacccgaaccgccagtggtttggggtgctggaaatgctcgctagcctggcggtgttttgcacggcgttgctgtatgtgcgttggcggcatcagttgaaccggcgactggccgattgactgatcgttcccacgctccgcgtgggaatgctgcccaggacgctctgcgtcccgggcctagtgcaagggtgacgcggagcgtcacaggatgcattcccacgcggagcgtgggaacgatcagtatcaatggttgacggtgtaggccaacatcatcgacagctgacacatcggccgcccactctcggcgtgccactggttgaaggcaccctgcaccgtcgccaaatcgcgcaggctggtcggggccttgtcgacgatcttctgcgcattcagcgccgccaccacgtcatcgcttggcacaaaggtgtccttgccgaccatgcgcaaaaagcgcggcgccgacagcccgcccagctggtggccatgcttgctcaggtacttccacagcccgacaatatcagtcaccggccaatcggcgataaatgcgccgaagctgcctttttcctgctcgatatccaggatcatctgcgcattgcgcggcacactcttgagcttgcccaggtggcggatgatgcgggtgtcctgcatcagccgttccaggtgctcggcgcccatcagcacgactttttccgggtcgaagccgaagaatacctgctcgaacgccggccatttggcatcgaccacgctgtgcttcaaaccggcgcggaacactcgcagcgccaaggtcgacaggtaacggtcatccgtgatcttgcgcaattgcgccggggtcttgggcaccggcagatgggcttccagcttggccgccgaaccgaagcggttcagacaatattcgtgcagccacttgtaatcgcgcatgccctctcctgtcagtcgaattgaaaacggcgctcgcaagcgccgtgtactagagccttgggaaggctcagaggttcactacattgacgaaacgcgatgcggcggtctcgtcgattttcaggctggtgaagtcgaacaggttgcggtcggccaattgtgacgggatcacgttttgcaggctgcggaagatactttcggtacgccctggggtcttgcgctcccaatccaccagcatgtccttgaccacctggcgctgcaggttttcctgggagccgcacagattgcacggaatgatcgggaattgcttgaagtcggagtaagcctggatgtccttctcgttgcaatacgccagcgggcggatcaccacgttgcgcccgtcatcggcacgcagcttgggcggcatggccttgagcgagccgttgaagaacatattgaggaagaaggtctcgacgatgtcatcgcggtgatgacccagggccatcttggtcgcgccgatctcatcggcaaaggtgtagagcgtgccacggcgcaggcgcgagcacagtgagcaggtggtcttgccttccgggatcagttccttgaccaccgagtaagtgtctttctcgacgatgtggtactcgacgcccagttctttcaggtaggccggcagcacatgctcggggaaaccgggttgcttctggtccatgttgaccgccacgatctcgaacttgatcggtgcgaccttttgcaggtgcagcaacacgtcgagcatggtgtagctgtctttgccgccggagaggcagaccatgaccttgtcgccgtcctcgatcatgttgaaatcggcgactgcttcaccggccaggcgacgcaggcgtttttgcagtttgttctggttgactgtaagagtgcccatggcgcttggatccgcaaaggtgtgtgacgaaaagcgcagcattttaccggcaagactgacggagttccaatgtgggagctggcttgcctgcgatagcggtgtgccagtcaacacctgcggtcctgacaggccgccatcgcaggcaagcccgcccccacactggatcgcatgagccctgacagaccgcaccgcgattagcgcccgtgtttacagcgcaatttgctctaaaggccctacggttattccggtcatcccttcctatactgcgacttgaggtcgcacatctatccagacctttcaggccatttggcccgtgggcgctccgatggggggcgatggtaataacgacaggagtgactggcatgatccatcacgtcgtggggctgtttacccatcccgaccaggaatggcgggaaatccgtggcgataaagaagaaagcatcggccacatgtacctcactcataccctgattctcgcggcgatccccgccatttccgcctttattggtaccacccaggtcggctgggtcatcggcaaccgcgccccggtgatgctgacccaggaaagcgcgctgtggatgaccctcatgtcttacgcggccatgctgtgcggcgtggcggtgatgggcgcattcattcactggatggcccgcacctacgacgccagcccaagcatggcccgctgcgtggcgtttgccacttacactgccacaccgttgtttatcggcgggctggcggcgctctacccgcatatgtggctgggcatggtggtgggcacggcggcgatctgctacacggtgtacctgttgtatgtagggctgccgaccttcatgagtatcgacccggatgaaggcttcctgttctccagttcggtattggccgtcggcctggtggtgctagtggcgatcatggcctttaccgtgatcgtctggggcctgggcgtcgggccgatctacaccagttgaccgaaaaaaaccgcaggcaaggccaccgcaaggtggctttgtgcgttatgcatgaccattcggcgcctgacagattcggaaacacccagctttgcggcatactgggcgtctctggagatatgtacagcatgcccgagcaactcaatacccgcgtcgaagattgtttcctgcaagccgaatcctttttcaaacgaagcttcaaacgcccccaggtcagcctcaagctgcggggccagaaagccggtgtcgcgcatttgcacgagaacctgctgcgcttcaaccctcagttgtaccgtgaaaacagccaacactttctcaagcaaaccgtggcccacgaagtggcgcacctgattgcccaccagttgtttggcgagcgtatccagcctcatggcgaggaatggcagttgatcatgcgcggggtttacgaactgccgcccgaccgttgccatacctacgaggtcaagcgccgacaggtgactcgctatatttaccgctgcccgtgtgcggacagtgattttccgttttcaccgcagcgccatgggctggtgaatcaggggcggcggtatttgtgtcggcggtgtcggcagaccttggtgttcaccggggaaactcgggtggaatgagggcctcatcgcaggcaagccagctcccacatttggatctgtgagcgcaatccaaaatgtgggagctggcttgcctgcgaaagcgcccgctcagtcaacctacaaccttggcctggcgcaattcatctatccgctgagcactgatccccaactccaccaacacctcatcactgtgcgcccccaccgccaccccaatatgcctgggcgctggtaaaccctcggagaacttcagcgggcaggccaattgcgcttgtgtcgagccatccccccggggcacctggctgaccagctcccgcgccttcacctgtggatgctccaccgcctcactcaaactcaacaccggctccacacacgcatccaccccggcaaacaactcacacaactggtcaaaactgcgcttctcgaactccacctgcaacgcctgtttgagcacggcctggcgttcgggcgtcacgctgtgtgccgccagttccggccgccccaatgcctcgcacagctgctgcataaaccccggctccagactgcccaccgacatccagcgcccatcgcgtgtgcggtagtagtcgtagaaactcccgccattgagcacatggttctcccacccaggctcgaccccgcaagccaggtaaccggccccagccatggcgttcaggctgaacgagcaatcggtcatgctcacatccaggtattgccccaccccgctttgctgcctggcaatcaccgccgccagcaagcccaccacggcatgcagcgaaccgcccgccacatccgccagttgtacgcccagcggtaatgggccggtgtcctggcgcccggtatggctggccacgccggccaacgccaggtagttgatatcgtgcccggcgcggtccttataggggccggtctgaccgtagccggtgatcgacacgtagatcagccgcgggttgatcgccttcagcgcctcatagcccaggcccagacgctccatgacgtcggggcggaactgttcgagcaagatgtcatagcccttgaccaactcacgcacgatctccagcgcctcggcctgcttgaggtccagggccaggctgcgtttgttgcggttgaggtaggcgtggctggccgaggtgccacgatcatggggcggcaacacacgcaacaggtccatccgcgtgggcgattcgatgcgcagcacctcggcgcccatgtccgccagcatcaaggaggcaaacgggccgggcagcaaggtggaaaaatccaacactttgagggacgccaagggacctgacatagagactccagttgggttgcgaatacccacagactaggcagccgggcgcctgccggcaatcgtcagaacgatcaaccacagtgaccgttttgatcacggcgggctttttcgcggcggcggctttatcattggccgacgtttgttggcagagtcttccatgaagttcgcgattgcactgtatagcgccgcccacgcgccctcttcgcgccgcgccctgttgttcgcccaggcagcgctggccggcgggcacgagattgtgcggctgtttttctaccaggacggcgtgtacagcgcgtccaacaacattgtcgcgccccaggatgagcaagacattgcgcgccaatggcgcgagcttgtcagccagcaccaactcgacggcgtggtgtgcatcgccgccgccctgcgccggggtgtgctgaatgccgaggaagctgcgcgctatcaacgcagcgcggtcaacctggaagcaccctgggcgttgtcgggcctggggcaattgcatgacgcgatccaggacgccgaccgcctgatctgttttggagggccgtgacatgtccaaatccttattggtgatcagccgccaggccccgtggtccgggccgagtgcgcgggaagcgctggatatcgtgctggccggtggcgctttcgatctgcccattggcctgctgttcctggatgacggtgtgttccaactggcgccgaaccaagctgccaaagccgtgcaacagaaagacctgagtgccaatctgcaggccctggctctgttcggcattgacgacgtgttcgcctgcgaccacagcctgtccgcacgcgggctgccgccgcccgccaatgcgcaggcgctcgacagccaagccatttcccagttgattgaccgttacgaccaggtgattaccctctgatgtcgactctacatgtggtgtctcattccccgtttactgacagccgcctcgacagctgcctgcgcctctgtggcgccgaagacgcaatcctcttgtgtggtgacggagcctacggcctgcacacgcccgccctgcaaaccagaggcgtaaaggtgtttgtgctggccgaagacatgcaggcgcgtaacctgccgctgcccgactgggctgacagcgtcgattacccaggcttcgtgcagttgtcgatcgactacgacaaggtcaacacctggctatgaacaccctgaccgtaggcgcacgcaccctggaactggataaggacggctacctcgtcgacctcaacgactggtccgatgaagtggcgcatgcccttgccaccgccgaagccatcgagctgaccccggatcaccgggaaatcctcgacctgctgcgccagttctacgccgaattccagttgtctcccgccacgcgcccgctgatcaagtacaccgccttgaagcttggcccggaaaagggcaacagcctgcacctcaacagattgttcaacggcactcccgccaaactcgccgccaagctggcgggcctgcccaggccgacgaattgcttatgaccgactttgcccccctgactctcgtaacgccccaagagcatccctttgcacaattcgtgcgcatcctcggcaaaggcaagcgtggcgcgcgcaacctcacccgcgaggaagcgcgggaagccatgggcatgctgctcgatgaaaaggtcgaggacacccagctcggcgccttcctgatgctgctgcgccacaaggaagaaagcccggaagaactcgccggtttcaccgaagcggtccgtgagcgcctgcacgcgccagcgttgaacgtcgatatcgactggccgacctacgccggtaaaaagcgccacctgccgtggttcctgctggcagccaaatgcctggcacagaacggcgtgcgcatcctgatgcacggcggcggcgcccacaccgcggggcgcttgtacaccgaacaattgctggacagcttgaacatcccgctgtgccgcgattggcaacaggtcgagagcgcctttgcccacggcaacctggcgtttatcccgctgggtgattgggcgccacagttgcaacgcatgatcgacctgcgtaacaccctgggcctgcgttcgcctatccattccttggcgcgcctgctcaacccactgaatgcccgctgtggcctgcaaagcattttccaccccggttaccagggcgtgcatcgtgatgccagcggcctgctgggtgacaacgtgattgtggtcaagggcgacggcggtgagatcgagatcaaccccgacaccctgagtcacttgtacggcaccactggcggccagagttgggacgaagagtggcccgccctctccgaccagcgccacgtcaagccggcaacgcttgagcccgagcacctcaaagcgctgtggcgcggcgacgctgaagacagctacccacaactggcgttgatcgccaccatggcgttggccctgcgcggccttggccacccacggcaacaggcgttcgaattggcccagcagtactgggacgcgcgggacaaatcgatttaatcgatcattcacgccggttctttgcgcttttagttcgaactcatctctttagactgggctccaacgcttatcagccaaggagccagtcatgggtttattgatcgaaggacaatggaaagaccagtggtacgaaagtagcgcagacggcgctttccaacgggaacaggcgcaacgccgcaactgggtgaccgccgatggcgcgccaggcccgagcggcgaaggcggcttcaaggccgaggccggtcgctatcacctctatgtgtctctcgcctgcccgtgggcgcaccgcaccttgatcctgcgcaagctcaagggcctggaaagcctgatcgacgtctcggtggtcagttggctgatgctggaaaacggctggaccttcgaccaggcccacggctccagcggcgacaaactggacgatttcaacttcatgcaccaacgctacaccgccgataccgccgactacaccgggcgcgtcaccgtgccggtgctgtgggacaaaaagctcaagcgcatcgtcagcaatgaatcggcggagatcatccgcatgtttaacagtgcgttcaatgagctgaccggcaataccctggatttctacccccaagccctacgcccgaccatcgacgccctcaacgaacgcatctaccccgccgtcaacaacggcgtgtaccgcgcaggcttcgccacctcacaacaggcgtatgaaagcgcgtttgatgatgtgtttgccgaattggatcatctggaacagcacctgggcagccatcgttatttggccggcgagtacctgaccgaagccgatgtgcggctgttcaccacgctgattcgttttgatgcggtgtattacagccacttcaaatgcaacctgcggcggattgccgactatgcgaatttgtcgaactggctaagggagatgtatcagtggccaggggtggccgagacggtggatttcgagcatatcaaggggcattactatgccagccatcgcacgatcaacccgacggggattgtgccgaaggggccgttgcaggggtttgataccgagcatgatcgccatgcattgcacggcaaaggtgtatggagctgacataaaccgcctgtaggagcgagcttgctcgcgaagaacgccaacgataacgcagctatcaggtagcccttggcgtccttgagtttttcgcgagcaagctcgctcctacagaggatcagtcgttcagacctgggactgggcgccctcgaaccacttgagcttttcacgcagtaccaccacctcacccacgatcaccaatgtcggcgcgtgcacttcatgctccgccaccatgcgcggcaggtcggccagggtgccggtgaacacgcgctggttggacgtggtgccctgctggatcaacgccgctggggtatcggctgcacgcccgtgcttgatcaactgctcgcaaataatcggcaagccaatcaggcccatgtagaacaccagggtctgcgacggcccgaccaggtcctgccagggcagatccgaggtattgttcttcaggtggccggtgatgaagcgcaccgattgggcatagtcgcgatgcgtcagcggaatcccggcataagccgcgcaaccactggctgccgtgatacccggcaccacctggaacgggatgccgtgggccgctaattcctcaatctcttcgccaccacggccaaagatgaacggatcgccacctttaaggcgcagcacgcgcttgccttgtttggccaggtcgaccagttgctggttgatctggtcctggggcacggcgtgatcggcgcgacgcttaccgacgtacacgcgctcggcatcacgacggcacagttccaaaatcgccggcgccaccaaacggtcgtacagcaccacatcggcttgctgcatcaggcgcagtgcacggaaggtcagcaaatccgggtcacctgggcccgcgcccaccaagtacacctcgccgggcgcataaggcggcgcgccattgaccttttcgatcaacaggcgctcggcctcctcgccctgcccggccaactggcggtcggcaatcgggccctggaacacttcttcccagaacgcgcgacgctgctgcacatccgggtacaaacctttgacctgggcgcgaaaacgcgccgccaaaccggccagttggccgtaggtggaaggtatccaggtttccagcttggcacggatcaggcgagccagtaccggcgcgtcaccaccgctggagacggcaatcaccaagggtgaacggtcgacaatcgccgggaagatcacgctgcacaacgctggcgcgtccaccacattgaccggcacgcagcgacgcttggcatcactggacacctgcgcattcagtggctcatcgtcggtggccgcgataatcagggtgcaaccgtccaggtcggcctcctgataaccgcgcaacatcaattccccgccactgcccagcaccagctcacgcagctggctttcgatctggggagcaaccacccgcaacaccgcgccggcgtcggccagcagtcgggatttgcgcaaggcaatctccccaccaccgacgaccaacacacgactgccgcgcaggttatgaaacagcggcagaaattccatttagcggatgacctcaacgcccgccatgtacggcttgagcacctcaggtacacggatcgaaccgtcggcctgctggtagttttccagcacggccaccagggtacggcctacggccaggcccgaaccgttgagggtgtgcaccagctccggcttgccggtttccgggttgcggaaacgcgcctgcatgcgacgggcctggaagtcaccgcagttggagcacgacgaaatctcgcggtatttgtcctggctcggcacccacacttccaggtcgtaggttttcacggcgctgaagcccatgtcgcccgtacacagggccagtacacggtaaggcagctccaacagctgcaacacgcgctcggcgttggcagtcaggccttccagggcgtccatggaggtcgacggctctactacttgcaccatctcaaccttgtcgaactgatgctggcggatcatgccacgggtatcgcgccccgacgcgccggcttcgctacggaagcacgggctgtgggccaccagcttcaacggcagttgcttggcgtcgaggatttcgccggcgacgatattggtcagcgacacttcggccgtcgggatcaggtacaggtcggcttcgccgtcgcggctgatcttgaacaggtcttcttcgaatttcggcagttggctggtgcccatcaacgccggcgcctgaaccaagtacggggtgtaggcttcctcgtaaccgtgttcgccggtgtgcaggttgatcatgaactgcgccagggcacggtgcatgcgcgcaatcgggccgcgcagcaaggcaaagcgtgcgccggacatttttgccgcggtttcaaaatccaggccaccggtcaattcgcccagggcgacgtggtccttgatctcgaaatcgaaggttttcggcgtgccccagcggcgcacttcgacgttgccgtcttcgtcttcgccgaccgggacggattcgtggggcaggttcggaatgcccagcaggatcgaatccaactgggtctgaatgccttccagctcgattttgccgtcggacagctcagtgcccatgcgctcgacatccgccatcaacggcgcgatatcttcgccgcgctgcttggcctggccgatggacttggagcgcgcattacgttcagcctgcagtgcttcggtgcgggtctggacggtcttgcgctgttcttccagcgcttcgatgcgcgcaacatccaaggcaaagccacgggatgccaggcggtccgctacgtcctgaaggttgctacgtaacagtttggaatcgagcatgtcggtctctcgttatcaaagtttggtcaaggacaggccagcccaggtggcgagcagcccgccgaatacgctgatggccgcatagccaatcgccagcggcacttgcccgctttccagcaggcgcacggtatccagtgaaaaggatgaaaaagtcgtcaggccgccaagaaagccaaccatcaggccggcacgtacctcgacaggcacttccgggcgtaacaaaaacaggccgtataacacgccgatcaacaggcagcccacgatattaacggcgagcgtcgccgtatagaagtgtttcggccaattggcattgatccaattgccggtagcaaagcgcagcagtgtaccggcgatacctccggccgagacggcgaccaccaaaggaatcatgattttctccgctgccgggggctcagacggtcgagggcggccagatgattgagcttctcaccgatcttcagctccaggccacggggcactggctgatagaacggctgcggttcaagctcatcggggaagtagtcttcgccggccgcataggcgtccggctcatcgtgggcataacggtattcgtcgccataccccagttgcttcatcaacttggtcggcgcgttgcgcaggtgcagcggcacttcgagggagccatgttcggcggccgcacgcagggccgacttgaagcccatgtacaccgcgttgcttttcggcgcgcaggccaggtaggtgatggcctgggccaccgccagctcgccttccgggctgcccaggcgctcctgcacctcccaggcggccaggcacaggctcagggcgcgcgggtcggcattgccgatgtcttcgctggccatgcgcactacacgacgcgccaggtacagcgggtcgcaaccgccatcgatcatgcgcgcaaaccagtacagcgcgccgtcagggttggagccgcgtacagacttgtgcagcgcggaaatctggtcatagaaggcttcgccgcccttgtcgaaacgcctgcgtgtgtcaccgagcaggctttgcaacaggtcgacgccaatctcgccaccgtcttcggccaggtcggaggcgttctccagcaggttgagaaagcgacgcccgtcaccatcggcggcggtcagtaaaatcttgaagccttcatcgctgaggctcagctggcgcttgcccaggcccttgtcttcgctcaaggcacggtgcagcagctttcgcatcgccgcttcatccaggctcttgagcacatagacccgcgcccgtgataacaaggcgttgttcaattcaaaggacgggttttcggtggtggcgccgataaagatcagcgtaccgtcctcgacgtagggcaggaacgcatcctgctgcgacttgttgaagcgatgcacttcgtcgacgaacaggatagtgcgcttgccgtactgcccggcctgctgcttggcgacttccaccgcctggcggatctccttgaccccggcgagcaccgccgagaccgtttcaaagtgcgcatccgagactttcgccagcaaccgcgccagggtggtcttgcccacgcccggcgggccccagaaaatcatcgaatgcagcgcaccctgctccagggcttcacgcaagggcttgccccgagcgagcaggtgttcctgaccgacgtactcatccagattggtcgaacgcaagcgcgcggccaatggctgggcaatcgggtcacttcgaaacagatccatgggcagcgtttgaaacctctgggcagtttattcctggatcacgtcggcacccttggggatgtcgaacttgaacttggacgcgggcaccggctggttagccttgaccccggagaacaggatatcggtgcgctggccgacgctgtcgaccaggcgcatgttgttgatcacgccgttgccgaacgacagggacagcgtgtcaaacagcgtgtccttggattttggcttgagggtgaactcgatgacgttgctggtctgcttggaggtgatgtcgaagctgtcgttgattttcgacacatcacccgacaacagcagcgccggggtctggttcaggcgcggatcgagcttcttgatggtggcctgttccaggtccgggtcccacagcgtgactttctggccgtcggaaacgatggtctgctccgccttgccttcggtatgccagtagaacagccctgggcgctgcacggccatttcaccggcggtttcctgcaactgggtgccgccggcatccagggtcagctgggagaagcgcgcggtgagggtctgggatttgtccaacaggttcttcaggctggcgacggaagccgggtcagcgtgagccgaaacagcggtcagggccagggccggcaacaacagcatgcggataaagcgcatgggagtcctcattgagtagtcagggcacgccgcgtgttgccacgcggcgcggaatcagtcgcgcatctgcccgggggcgatgacttcacgcgagccattggtgttcattgcggtcacgacgccggccatttccatggcttcgatcatgcgggcggcgcggttgtagccgattttcagcttgcgctgcaccgccgaaatcgaggcgcggcggctttccagtacgaaggccacggcttcgtcgtagagtgcgtcggtttcagcatcatcgtcgccaccgctgctgccaccgtcgaagccgctgccggcctcttccacgccagcgagaatgtcgtcgttatattccggcgcgccacgcagtttccaggcttcgaccacacggtggacttcgtcatcggaaacaaaggcaccgtgaacgcgaatcggcaggctggtgcccggcggcatgtagagcatgtcaccgtggcccagcagttgctcggcgccaccctggtcgatgatggtgcgcgagtcgatcttgctggagacctggaacgccatgcgcgtcggaatgttggccttgatcaggccggtgatcacgtccaccgacggccgctgggtcgcaaggatcaagtggatacccgccgcccgcgccttctgggcaatacgggcgatcagctcttcaaccttcttgccgacgatcatcatcatgtcggcaaattcatcgaccaccaccacgatagtcggcagcttggtcagcagcggtgcttcatcgtgaatgctttcgcgcttgtacagcgggtcggtcagcggtgtgccggcgtcctgggcttccttgaccttggcgttgaagcccgacaggttacgcacgcccatcttcgccatcagcttgtagcggcgctccatctcggcaacgctccagcgcagagcgttggcggcgtccttcatgtcggtgaccaccgggcatagcaggtgcgggatgccttcgtagatcgacagttccaacatcttcgggtcgatcatgatcagcttggcgtcatccggcccggacttgaacaggatcgacaggatcatggcgttcacacccaccgacttaccggaaccggtagtaccggctaccagcaggtgcggcattttcgccaggtcggtaatcaccggcttgccgccgatgtcatggccgagtgccagggtgaccggcgatttgaagttgtcgtattcaggggtcgacagcacttcggagaagcgcacgatctgccggtcttcgttggggatctcgatacccacggtggtcttgcccgggatcacttccaccacacgcacgctggtcacggccagggaacgcgccaagtctttggccaggttggaaatgcggctgacttttaccccggcggccggctggatttcgtaacgggtaatcaccgggccaggatggatcgagtccaccgacacttcgacgccgaattccttgagcttgatttccagcaggtggcccacggccgccagggattccggggaatagttgagttgtttcttttcggccgggtccagaatcgagatcggcggcaaggtgccttcgacggcgctgtcgataaacaacggtgcctgcttctctttttgcacgcgatggctgggctccggcgccttgggcggtgccggggcgatcacgggcggcacctgcttttcacggtccgacatgtgcttgctcagggcctgctcgcgctcgatcaagcgctccttgaccttggcttgctcgcgtcgatccggcgtgcttggagccaccacctcgttgacacgggtgtcaacctcacgcagctgcgccaccatttgcttgcgctcgacacgggcggcccaccagcggttggcggcgccctggaacaattcgaacaggtcgagggtgatcttgccggtcacgtccatcaccttgaaccatgacaggtcggtgaataccgtgaggccgaacaggaacagcgcgatgaacatcaacgtgctgccctggatattcagggttctgcgcgccaggtcgccaaggctttcgcccagagccccgcctgcgcccgccggcaagccggtcggtgcatggaagtggatatgcgccagcgccgcgcccgacagcaccaggaacaccaggccgatcaggcgccaggaaaacagccagccgctccactgccacggctcgtgacgctggcggaagatctgccaggtcttgatagccagcaacagcgggaaaatgtaggcgaagtaacccaggatcatgaagaggatatcggcgctgtaggaacctaccgggccgccgaaattctgcacgtcatcgatcttgctgttatggctccagcccggatcgtccttgccataggtgagcaaggccatcatcaggaacaggcacagcgcaccgatggcaatcagtgcgccttccttgagtcggtaatgcaggtgctggcgccaggccggtacgactgctgctttaggtgctgcggcggatttcttcaaaacgggtctattcctgcgcctttagcgcgtccatctgttgaatgactacacacgactgctctatccggagcagctgaaaaatgaacgaatgttgctgaatctacttttaacatcaggtgacggataggtgaaatggcgataacgccacaatggccgcattgtacgggtttgcgtgcgtgatgccacacacttgcccttcacctgactgcgcggacaatttgagcacgcattgtctttgctgacaaaggcttatgagctgtatttagcaatccaggcaagcttggcaaatggccggcatgtgccagacccgattacgaccacaccctgtgtatagagttgcagaaacacccgctcatgctaatccacgtcaatagcctattcgggctggccccgtggcgccgggtcgtcaataatcaacgcttgcggcgcaggtgaatgacctgccactcccctcccctaccgtaagcctggatgccatgctgacctggttacaacgcgacaccctgacgttccctcccctggccaaggccatgcgcgaccccaacggcctgctcgccgccggtggcgacctgtcggccgaacgattgatccaggcctaccgccatggctgcttcccctggttctccgaaggccaacctatcctctggtggtcacccgacccgcgcacagtgatattccccgacgagctgcatgtttcccgcagcctgggcaaattattgcgccagcagcgctataccgtgaccttcgaccaggatttcgccgccgtcatccaagcctgcgccgcgccccgcgcctacgccgatggcacctggatcaccgaaggcatccagcaggcctaccttgagctgcaccagcgaggctacgcgcattccgtcgaggtctgggaccagggcgaactggtgggcggcctgtatggcctggcgatggggcagctgttttttggcgagtccatgttcagccgcgccgacaacgcctccaaattcggtttcgccacattgacccggcaactgcaagcctgggggtttgtgctgatcgactgccagatgcccaacgatcacctgcacagcctgggtgcccgcggcataccgcgcagcgtcttcgccgacttcctgcacaaacatctggaccaacccaacgctgggccgtgggtttcctaggcgactttcgcacacgtggcttacacttatttcaaagcttatcccgagggttgatcatgaccgagctggcgcgcttgaagttctatgccactcaagcccactcatgcagctatctgcccgacgagcaggccaccacgctgttcctcgatcccagccagccaatggacgtgcatgtgtatgccgacctgtccgagatgggctttcggcgcagcggcgatcacctgtaccgcccccattgccagaattgcaatgcgtgtgtgcctgcgcgcatcccggtggctcaattttcgcccgaccgtaaccagaaacgtattctcaagcgcaacgccgacttgaccgtacacgccactaaacctcaatacagcgaagaatatttcgatctctaccaacgctacatcgaacaacgccacgccgacggcgatatgtttccgcccagccgcgaccagttttccacgttcctggtgcgtgacctgcccttttcgcgcttctacgagttccgcctcgacggccgcctgctggccgtggcggtgaccgacctgctgcccaatggcctctcggcggtgtacaccttctacgaaccgaccgaagaacgccgcagcctcgggcgtttcgccatcctgtggcaaataggcgaagcgctgcgcctggagctggaagcggtgtacctcggatactggatcaagaactgcaaaaagatgaactataagactcaatatcggccgattgagctgctgattaatcaaagatgggtcacgcttaactagaaccccttggcttgaacaccctttttcgggcacaatgcacgccgcttttgcctggcgcagttgcaccgggccattcactggataccgagggctttactgcatgtcgaaagaagacagcttcgaaatggaaggcactgtcgtcgacaccctgcccaacaccatgtttcgtgtggagttggaaaatgggcacgtcgtaaccgcgcatatctccggcaagatgcgcaagaactacattcgtattcttaccggtgacaaagtgcgcgtcgagctgacgccctatgacttgagcaaagggcgcatcacttaccgcgctcgctaagcaagtcaatacaaaacgcccggttatgccgggcgtttttgtgtgcgcaggatttaacagtcaccacttgactctgtgggagctggcttgcctgcgatggcggcgggtcagatatagatgcgctattgaaggaccgccatcgcaggcaagccagctcccacagttgaacgtcattacttcgtaaatcgtattgcacacagcaaaaaggcgcctttcggcgccttttgcaatgttgcagctaacgatcaggccatttccgccgtggtctcgaactcgaaggtcagctcgccgtccttcaggtcgatgtgcaccacgccgccatggtcggagagttcgccgaacaggatctcttcggccaatggccgcttgatcttgtcctggatcagacgcgccattgggcgtgcgcccattgccgcatcgtagccgccctctgcgatccaactgcgggccgcttccgtcacatccagctgcacgcgcttgtcttccaactgcgcttgaagctcggtgaggaacttgtccaccacgcttttgatgacctcatggctgaggcgaccaaactggataatggtgtccaggcggttgcggaactccggcgtgaagctcttcttgatcacttccatggcatcagacgagtgatcctgatgcgtaaagccgatcgaagcacgcgccgcggtttcagcaccggcgttggtggtcatgatcacgatcacgttgcggaagtctgccttgcgcccgttgttgtcggtcagggtgccgtggtccatgacctgcaacagcaggttgaagacttccgggtgagccttttcgatttcgtcgagcagcaatacgcagtgtggctgcttggtgatcgcctcggtcaacaggccgccctgatcgaagccgacatagcccggaggcgcgccgatcaaacgcgacaccgtgtggcgctccatgtactcggacatgtcgaaacgcaccagctcgatgcccatggccttggccaactggcgagccgcctcggtcttgccgacgccggtcgggcctgcgaacaggaacgaaccgactggcttgtccggcgacttgaggcccgcacgggacaacttgatcgccgtggacagcgagtcgatggccgcatcctgaccaaacacggtgagcttgaggtcgcgctccaggttacgcagcaactccttgtcggaactggtgacgtgttttggcggaatccgcgcgatcttggccacgatgtcctcgacctgaggcacgtcgatgcgcttcacgcgcttctcgaccggctgcaggcgctggtaggcacccgcctcgtcgatcacatcgatggctttgtctggcatgtgccggtcgttgatgtagcgcgacgccagctcagccgccgcacgcagggcctcatcggtgtactcgatgccatggtgcgcttcaaaacgccccttgagcccgcgcaggatgccgatggtgtcttcaaccgagggctcggacacgtcaactttctggaagcgacgcgccagggcgcggtctttctcgaagatgccgcgaaattcctggaacgtggtcgaaccaatgcagcggatatcaccggaggacagcagtggcttgagcaggttggaagcgtccatcaccccaccggaagccgcaccggcgccaatgatggtatggatctcgtcgatgaacaggatggcctgcgggcgttttttcagctcgccgagcaacgccttgaagcgcttctcgaaatcgccacggtacttggtcccggcgagcaacgcgcccaggtcaagggagtagacgacactgctggccagcaggtctggcacctggttgtcgacaatgcgcttggccaggccttcggcaatcgcggttttacccacgcccgcctcgcccaccagcaatgggttgttcttgcgacgacgcgccaggatctgcgctacacgctcaacctcatgctcacgccccactagcggatcgatccgcccctggcgcgccatttcattgaggttacttgcataggcatccagcgggttgctggaagaagaagactcgccgccctcctcgtcctgcatgtcctgctcaccctcggaatgatcgccgtgcccaggcaccttggagataccgtgggcgatgtagttgaccacatcaatacgggcaacgctctgctgcttgagcagaaacacggcctggctttcctgttcgctgaaaattgccacaagtacattcgcgcctgtgacctcacgcttaccggagctctgtacgtggaacacagcacgctgcaatacccgctggaagcccagggttggctgggtttcgcggtcctcgtcatgcacggggatcagtggcgtggtggagtcgataaactcctgcaggtcatgcttgagcttgtcaaggttggcgccgcacgcacgtagaacggtggcggcagcttcgttatccaaaagtgccagcaaaaggtgttcgacggtcatgaattcatgacgcttcgaacgagcctccttgaaggcaagattgagggtgacttcgagctcgcggtttaacatagcttcacctcatacccaagtggtcggcgttaaccgtccttctcgatttcacagagtagcggatgctggctttccctggcgtactggttgacctgcatggcctttgtctcggctatgtcgcgggtaaacactccacatactgcccgtccttctgtgtgaacggccagcattaccttggtcgccaactcgcggttcaggttgaaaaacacctcgagcacttcgacgacgaaatccatcggtgtgtagtcatcattaaacaaaaccaccttgtacatcggcggcgcctgtaaagcaggcttcgcctcttgaacagcaatgcctgcagaaccgtcgtcatgttcctgatccgggcgatcctgattgaatgttagtcgaatctggctgtttgcatgcatgggaaagaaaggttcgtcagtggttcaattacagtggtgggggcgacctgtcagaatttcaactctgaccgcctggtcgccttgactatcggcgaaacggtgttacaaccaatagaacccacagtgggtaaaaaaggtccgcgcagtcaaccttatttattcgggttaggacggatagacaggatgatactccagtgatggagtctggtgcagagggatatgggaatggctagtggtaaggtcaaatggttcaataatgccaaaggtttcggcttcgtcattgaagacggcaagactgaggacctttttgcgcatttctcagcgatccagatggaaggctacaaaacgttgaaagcgggtcagcgtgtcaactttgaaatcattcaagggccaaaaggcatgcatgccgtaaatattgttgatgcgcctgccactgcaggcgtgaaagaaacaaaggtagaaaaatcagagaagcaacgtgcctgaccagccactgaaattaagcactcaaagcaaaccggccgccccgattcatcagtgcggccggttttctctgcctgtttacatatgcttgatcaacgcatcaccaaatcccgacgacgacaccaacgtagcgccatccatcagacgctcgaagtcataggtcacggtcttggccgaaatcgcgccgttggtgcccttgatgatcagatccgccgcctcgacccagcccatatgccgcagcatcatttctgccgacaggatcaatgaccctgggttgacctgatccttgcctgcatatttaggcgcagtaccatgggtggcttcaaacattgcaacggtgtccgacaggttggcccccggtgcaataccgatgccgcccacttccgccgccaaggcatcggacaggtagtcaccattgaggttaagcgtggcgatcacgtcatactcggccgggcgcagcaggatctgctggagcatggcgtcggcaatggcatccttgaccaccacattcttgccggtcttggggttcttgaactgcatccacggcccgccatcgagcagggtcgcgccgaactcttcagccgccacctcgtaggcccactccttgaaggccccttcggtgaacttcatgatgttgcctttgtgcacgatggtcagcgagtcgcggtcgttatccaccacatactgcaaggccttgcgcgccaggcgcttggtgccctctttggagaccggctttacgccaatcccgcaatcctggtcgaaacggatcttggtaacgcccatttcttccttgaggaacttgatcaccttgatcgcctccggcgaaccggccttccactcgatgccggcgtaaatatcctcggagttctcacggaagatggtcatgtccacgtcgccaggctttttcaccgggctgggcacgccttcgaaccagcgcaccgggcgcaggcacacatacaggtcgagttgctggcgcagggccacgttcagcgagcggatgccgccgccgaccggcgtggtcagggggcccttgatggacaccacgtaatccttgaccgcctccagggtttcctggggcagccacgtatcctggtcgtagacttgcgtggccttttcgccagcgtacacctccatccaggagattttgcgcttgccgccgtaagccttttcaacagcggcgtcgaccaccttgatcatcaccgggctgatgtcgacgccaataccgtcaccttcgatgtaggggatgatcggttggtcaggaacattgagagaatggtctgcattgacggtgattttgtcgccgactgccggaacctgaatcttcttgtatcccatgctgaactccatctatggattgaacatctggctgcgttcgagcctactccagataaatggcgactgaaacctcacgccatgctcatttgcatcgaaaacagcatatttggtggcctacaagcctgaaagcaaagggaaaagcgccaattttgagcacatcccaccaccccgtgcgcctgcgacctttagaccaatggacgagcctcctttttcatgaaggctcagcgtaagcatagcgacctatgtataatgccgccgctgaccaaagagtcacgacggcggaccgctctagaacgtagcctttcgccagaaagccggactattaccatagcccacccgcttgacgctcgactgatgcaaaccaacatcaccgcgaagaaacctcgacatttcgctcatggatgactttgaacgaacgcgctctacccggcgcatctcgagtttctgcgcacgctttcagcaaagaagagagttaatccgaatatgcccacccgctcgaagatcatctacaccttcaccgacgaagccccagccctcgccacctattcactgctgcctatcgtagaggccttcaccgcttccgctgatattgccgtggaaacccgcgacatttccctcgccgggcgcatcctcgcaagcttccccgagcaactgggcaccaaggccatcccggaccacctcgccgaactgggcgacttggccgttacgcctgaagccaacatcatcaagcttcccaacatcagcgcctcgaccccgcagctgcaagccgcgatcaaggaactgcaggcccagggctacgccctgccggactaccctgaaaccgtaaccaccgacgcggaaaaagaaacccgtgcacgttacgacaaggtcaagggcagcgccgtgaacccggtcctgcgcgaaggcaactccgaccgtcgcgcaccgctgtcggtcaagaactacgcacgcaagcacccgcacaagatgggcgcctgggctgccgactccaagtcgcacattgcccacatgaacaacggcgacttctacggcagcgaaaaagccgtgcagatcgaagccgctgacgctgtcaaaattgcgctggtcgcaaaggacggcaccaccgccgtcctgaaggaaaagaccaacgtacaggccggcgaaatcatcgacaccgccgtgctgagcaaaaaagccctgcgcagcttcatcgccgctgaaatcgaagacgccaagaagcaaggcgtgctgctgtcggtccacttgaaagccaccatgatgaaggtctccgacccgatcatgttcggccagatcgttgccgagttctataaagacgccctggccaagcacgccaccgtgctggagcagatcggcttcaacctgaacaacggcatcggcgacctgtacgcccgcatcaaggccctgccggccgaccagcaagcgcagatcgaagccgacatccaggcggtctacgccgcgcgccctgccctggcgatggtcaactccgacaaaggcatcaccaacctgcacgtgccgagcgacgtgatcgtcgacgcctcgatgccagcaatgatccgcgactccggcaagatgtggggcaccgacggccagttgcacgacaccaaggccgtgatcccggatcgctgctacgccaccatctaccaggcggtcatcgaagactgcaaggccaatggcgccttcgacccaaccaccatgggcagcgtgccaaacgttggcctgatggccaagaaagccgaagagtacggctcccacgacaagaccttccagatcaaggctgacggcgttgtccgcgtcaccgacagccagggcaacctgctgatggaacagaacgtcgaagctggcgacatcttccgcatgtgccagaccaaagacgcgccgatccaagactgggtcaagctcgccgtcaaccgtgctcgcgccagcaacaccccggccatcttctggctggaccctaagcgcgcccacgatggtgtagtcgtcgagaaagttcaggcttacctcaaagaccacaacaccgaaggcctggacatccgcatcatggccccggtcgatgcgatgaagttcaccctggagcgcacccgcaagggcctggacaccatctcggtgaccggtaacgtactgcgcgactacctgaccgacctgttcccgatcatggaactgggcaccagcgccaagatgctgtcgatcgtgccgctgatgaacggtggcggcctgttcgaaaccggcgctggcggctcggctccaaagcacgtgcagcaactgctggaagaaaacttcctgcgctgggattctttgggcgagttcctggccctggccgcgtcccttgagcacttgggtgtgacatacaacaacccgaaagccctggtactgtccaagaccctggaccaggctaccggccagttcctggacaacaacaagtcgccatcgcgcaaagtcggcaacatcgacaaccgcggcagccacttctacctggcgctgtactgggcacaagccctggccgcccagaccgaagacactgcactgcaagcgcagtttggcgaattggccaaaaccctggccgagaacgaagcaaccatcgttgccgaactcaacgccgtacagggcaagccagtggacatcggcggctactacgcgccgaacccagagctgaccagcaaagccatgcgcccaagcaacaccctcaatgcggcgattgccaagttgaagtaaggttgtaaggatgcaaagaagccccggccaagtgccggggtttctgcttgtagggacttcattgaagaaacccaatccaatgtgggagctggcttgcctgcgattgcagtctgtaggagcgagcttgctcacgaaaaactcaaaggcgccgcgttcattcagcaagcacgcgttatcgttgacgtttttcgcgagcaagctcgctcctacaaaaaagccttaattgactggcattaaggcaagccagctcccacattgaccgagtcaccttccagataccgaggttcgcaatgacctggctcccccacatcaccgtcgccaccatcgtcgaagacaacggcaagttcctgatggtcgaagaactcaagggcggccgcgccgtgctcaatcagcccgccggccacctggacccgaacgaaaccctgaccgaagccgccgtgcgcgagacgctggaagaaaccggctgggacgtggaagccaccggcatcgtcggcatctacctgtacaccgcacccagcaatggcgtgacctatcaacgggtctgctttgtcgccaaggccctgagacaccacccggagtaccaactcgacgaaggcatcctgcgcgcccgctggttgacccgtgacgagctgatggcggtgcgcgacgactggcgcagcgagctgattatccgctgcatcgatgattacctggccggccagcgccacagtctcgaattgatccgcccttctctttagccttgcgggcccaggcctgctagaatcgcgtcctttttcaagacacccgttgaaaccctatgcgtgatccagccccttctgacacacaaaagaagcgcgtcatcgtcggcatgtccggcggcgtggactcttccgtttccgccgttctgctcatggagcagggttatgaggtggaaggcctgttcatgaagaactgggaagaagacgatggaacggaatactgcaccgccatggacgacctggccgacgcccaggccgtgtgcgacaagatcggcatcaagctgcacaccgccaacttcgccgccgagtactgggacaacgtgttcgagcacttcctggccgaatacaaggccggccgcacgccgaacccggatatcctgtgcaaccgcgaaatcaagtttaaggccttcctcgactacgccatgatgctcggcgccgacctgatagctaccggccactacgtgcgccgtcgcgatatcgatggccgcaccgaattgctcaagggcctggacccgaacaaggaccagagctacttcctgcatgccgtcggcggtgaacagatcgccaagacgctgttcccggtcggcgagctggaaaagcccgaagtgcgcaagatcgccgagaagcacggcctggccaccgccaagaagaaagattccaccggtatctgctttatcggcgagcggcgtttcagcgacttcctcaagcaatacctgcccgcgcaaccgggcgagatcaagactaccgacggtgaagtgatcggccgtcaccacggcctgatgtaccacaccatcggccagcgtcagggcctgggcattggcggcctgaaggacgcaggtgaagagccgtggtacgtgctggtcaaagacctggaaaacaacgtgctggtggtcggccaaggcaatgagcacccgctgctgttctccggcgccctgctcgcttccgagatctattgggtcaacccgatcgacttgagcaccccgcgccgcctgaccgccaaagttcgttatcgccagagcgaccagccctgcaccctggaaaagaccgccaccggttaccgcgccatcttcgatgacccgcaacgcgcggtcacccctggccagtccgtggtgttctatgacggcgaaatctgcctgggcggcggcgtgattgaagttgcgcaagcctggagcaacccggcatgagcccgacccaggagcagttgacagcccttggcggtgtgtttctcgctgcggtactggtggacaagatcgccaagaccggccaagtcactgaagccggcctgacctgcatgctcggtagcctgctgatccgcgatcccaaggacacccttgaggtttacggcggcgacgacctggcgctgcgtgaaggctatcgcgccctgatcggcgccctggagcgcgaccccagcaccttgcagcgcgaaccgttgcgctatgccctgtcgatgcttggccttgagcgccaactggccaagcgcgacgacctgctggacaccatcggcaagcgcctgccgcagatccagtcccaggtagaacacttcggcccggcccacgaaaacgtgatcgcagcctgtggtgcgctgtaccaggacaccttgagcaccctgcgccagcgcatccaggtgcacggcgatatgcgcaacctgcaacaacccaacaacgcgtcgaaaatccgcgcattgctgctggccggtattcgttcggcacgcttgtggcgccagctgggcggtcatcgctggcagttggtgatcagccggcgcaaattgctcaaagagctttacccgttgatgcgcaacgaataagtcgcaccaacaggctgttttcaagccattacgcgtaatacgccggtcagttggcgacggaccggcggattttttcatgtatgatacgcgccccatttcgttgcccgactgtccgagaacaccccatgcagctctcttcgctcactgcggtttcccctgttgacggccgctacgccggcaaaacccaggccctgcgccctattttcagcgagtacggcctgatccgtgcccgtgtcctggttgaagtgcgctggctccagcgcctggccagtcaccgcgccatcagcgaagtgccggcgttttccgccgaggccaacgctgtattgaacaccctggcggaaaacttctccctggagcacgccgagcgtgtgaaagagatcgagcgcaccaccaaccacgacgtcaaagccatcgaatacctgctcaaagagcaagcggcccaactgccggaactggccaaggtcagcgagttcatccactttgcctgcaccagcgaggacatcaacaacctgtcccacgccctgatgctgcgcgaaggccgtgatgacgtgatgttgccgctgatgcgccagactgccgaagccatccgcgagctggcgatccgtttcgctgccgtgccgatgctgtcgcgcacccacggccagccggcctcgccaactaccctgggcaaagaactggccaacgttgtgtaccgcctggagcgccagatcgcccaagtcgccgccgtgccattgctgggcaagatcaacggtgccgtaggcaactacaacgcccacctgtcggcctaccctgagatcgactgggaagccaacgcccgcgccttcatcgaagacgagctgggcctgggtttcaacccctacaccacgcagatcgaaccgcacgactacatcgccgagctgttcgacgcgattgcacgcttcaacaccatcctgatcgatttcgatcgcgatatctggggctacatctccctgggctacttcaagcagcgcaccattgccggcgaaatcggttcgtcgaccatgccgcacaaggtcaacccgatcgacttcgaaaactccgaaggcaacctgggtattgccaacgccctgttccagcacctggccagcaagttgccgatctcccgctggcagcgcgacctgaccgactccactgtactgcgcaacctcggtgtcggctttgcccacagcgtgatcgcatacgaagccagcctcaaaggcatcagcaagctggagctcaacgagcagaagattgccgctgacctggacgcgtgctgggaagtactggccgagccgatccagaccgtgatgcgccgctacaacatcgaaaacccctacgagaagctgaaagaattgacgcgcggcaagggcatcagccccgaagcgctgcaaactttcatcgacggcctggacatgccagccgcggccaaggccgagctgaaactgctcaccccggccaactacatcggcaacgctgtagagcaagccaagcgcatctgatccaagcaagctcctttgagacgcccggccgcgccgggcgtttttattcctgtcttaaaagtgctttttttcaataggttacacatgaatcctgatatccctcttcaacttctgggcggcatcacggcacgggaattcctgcgcgactactggcagaaaaaaccgctgctgatccgccaggccctccctgacttcgaaagcccgatcgatgccgacgaactggcaggcctggccctggaagaggaagtcgagtcgcgcctggtgatcgaacacggcgagcgcccgtgggaactgcgccgcggcccgttcgccgaagacgctttcagcaccctgcccgagcgtgagtggaccctgctggtgcaggcggtcgaccagttcgtgccggaagtggctgagctgttggagcacttccgcttcctgccgagctggcgtatcgatgatgtgatgatcagcttcgccgcgccgggtggcagcgtcggtccgcatttcgataactacgatgtgttcctgctgcaagcccagggcaagcgcaactggaagatcggccagatgtgcaattccgaaagcccgttgctgcaacacgccgacctgcgcatcctcgccgaattcgaagaaagcgccgaatgggtactggaaccgggcgacatgctctacctgccgccgcgcctggcccatttcggtattgccgaagacgactgcatgacctattccgtcggtttccgtgcaccgagcgccgccgaagtgctgacccacttcaccgacttcctcagccagtacctgaccgacgaagaacgctacaccgacgccgacgcccagccggtcagcgacccgcaccagattcagggcgacgcactggaccgcctcaaggacctgctcgccgagcacatgagcgatgagcgcatgctgctgacctggttcggccagttcatgaccgaaccacgctacccggagctggtagccggcgaagagttgggcgaagaagacttcatcaacagcctgcaagacggcgcgatcctggtgcgcaacccgagcgcgcgcctggcctggtccgaagtggacgacgacgtcctgctgttcgccagcggccagagccgttacctgccgggcaaactgcgtgaactgttgaagctggtgtgctcggcggatgcactgcacagcgaaaacctgggcgagtggctggccgacgaagacggtcgcgacctgctgtgcgaactggtcaagcaaggcagcctggggttcgcggatgaataaaattcacgtaagtgtcgcggactggcgaaaggatatcgacgagattcggcgcattcgtgaagcggtatttatcgccgaacaatcggttccgcctgaactggagtgggacgcggacgatgccggcgccatgcattttcttgcatacgaaggcgacttcccgattggcactgctcgactgctgcccagcggcgagattggtcgcgtgtcggtgctcaaggattggcgcgggctgaaagtcggcgacaagctgatggaagccgtgattggcgaggctgtgaaacgcggccagacccggcagttcctgagtgcgcaggtgtatgcggcgccgttctatgagcggctgggtttcaagatcgtcagcgatgagtttcttgaagtcgggattccgcatgtggatatggtgcgcgagggctaattcgagaccgcgccgcctttatcgcaggcaagccagctcccacatttgactgcattccaagtgtgggagctggcttgcctgcgatagctatttcagcaacaccctgaatgccctgcctgccagggcattttgccgtctacgattcaacttgcaccctgccaggccgacaaactggcactatcaagcaaatgactcgcagagataacggacatgtccctacgcaccctgctcaccgcccttctgatgaccgtcagcgcttgcgccatggccgccactgaagtcgtcaacctgaacaaccgcaccagcgccgacctgctgcccgtggcgcagaacttcatcggcaaggacggcaccgtcagcgcctacggcaaccaacttatcgttaacgctgagcccgccaagatcgagggcttgcgcgcactgctcggccaattggatacaccggccaaacgcctgctgatcaccgtcgataccaacgagaacaaccagcagaacagcggtgacagccagacccgcatcatcagctacggcactgccagccgcgacggtggcgtgcagcagatccaggccagcgaaggcgtgcctgcgctgatccaggtcggccagagcgtaccgctgaccaccacgcaacaggacagctatggccgtctgcaaaaccagacccagtatcgcaacgtcacccagggcttttacgtgaccgccagcgtcactggcgaaaccgtacacctggccatcagtaccaaccgtgaccgcatgagccaggaacgtcccgatgtagtgaacgtgaaaagcaccgacacaactgtcagcggccgcctgggcgaatggatccccctggccggcatcaatcgcgaaacccaggcggacaaatcctctacaacccgcagctactctactcagggccgcgatgacctgactttacgggtcaaggtcgacaccctgaactgaagcaccgaaaactgactggcaagtcgcattagactaaagatgtagtgcttgaaaaaaagcactacaaaacatttgacgagccaaaaaagcatgggcatgatggcctcgctcccgctaatcaggggccctggcaagggccttcggatcgctgctctaagctacccacctgagccgattcgtgtctgtaccgcccacaaggtgtgtttgacgttggttgcgactggaacgaagttgtcccgagggacggaagctaaccaggtaacccggctacacactgatggatcgtaccaaggcccacgacgcccgaagaccgttcgcagtttgcccttacctgctcaactcccccctttgagccccatcgttcatcccgtcgcctacctccgtcagatttgacttgaacaccaaagcttctggtcagcgagcaaccctacccaggcaacgaatgccgggctggcaaacggatacttcaaacaagacgcgacgaggtttttccccatggcactgacacgcgaacagcaaattgcagcccttgaaaaagactgggctgaaaacccacgctggaaaggcgtaacccgcgcttattccgctgctgacgtcgtccgcctgcgtggctcggttcaacctgagcacacctttgcaaaactcggcgccgagaagctgtggaacctggtcacccaaggcgccaagccgtccttccgtcccgacaaagatttcgtcaactgcatgggcgccctcactggcggccaggcagtccagcaggtaaaagccggtatccaggcgatctacctgtccggctggcaagtggcagcggacaacaactccgctgaatccatgtaccccgaccaatcgctgtacccggtggactcggtgccaaccgtggtcaagcgcatcaacaactcgttccgtcgtgccgaccagatccagtggaaagccggcaagaacccaggcgatgaaggctacatcgactacttcgcgccaatcgtggccgacgccgaagccggtttcggcggcgtactcaacgcctacgaactgatgaaaagcatgatcgaggcaggcgctgccggcgtgcacttcgaagaccagttggcctcggtgaaaaaatgcggccacatgggcggcaaggtactggtaccgacccaggaagccgtacagaagctgaccgccgctcgcctggccgctgacgtggccggtacgccgaccatcatcctggcccgtaccgacgccaacgcagcagacctgctgacctcggactgcgacccgtacgaccagccgttcgtcaccggcgaacgcacccaggaaggcttctacaaagtgcgcgccggcctcgaccaggctatcgcccgtggcctggcctacgcgccgtacgccgacctgatctggtgcgaaaccgccaagccggacctggacgaagcacgccgctttgccgaagcgatcaagaaggaatacccggaccaactgctgtcctacaactgctcgccttccttcaactggaagaagaacctggacgacgcgaccatcgccaagttccagcgtgagctgtcggccatgggctacaagcaccagttcatcaccctggccggtatccacaacatgtggcacagcatgttcaacctggcgcacgactacgcccgcaacgacatgactgcctacgtgaagctgcaggagcaggaattcgctgacgccgccaaaggctacaccttcgtggcgcaccagcaggaagtgggcaccggctacttcgacgacatgaccaccgtaatccagggcggctcctcgtccgtgaccgcgctgaccggctcgaccgaagaagagcagttccactaagtaccgcgtacacggccactgcggccccacggaagacctaaccgcagtgccgcgcaacaatcacgccccgactggttcggggcgttttttttgcctaggaatcaccgaaaatcaatggtgggagctggcttgcctgcgatggcggtgggtcagaggcaggtgtttcagctgattcgctgctatcgcaggcaagccagctcccacattgaccgcgccctatccatagttttttgctaaaaacattgatccagagcggtatccgcacaggcccaatcgggtaaaagagccgttgcagcaactaagcagcactcaagcaagtaacgctaacttcccgcgccacatgagaaacactcgcttaaacctctgcgcaaacaatattcattatcatttggcgcttgaaaacttcgttacatcttaaacaaaacatatttgatgaaaagcccgctaatgcccacaccacaagggctacagccccaagaaggtgcactatgtgcttattccaccgaataatttcgccctgggaattttacttgcccggtgtttagccataaaatcaccgcgattgattgcagtgcgacatatcgtcactgcatcgttactttttcgagctcagagacctttgctctctgttaaggatttccagcatgaccgacgcgacaggactcatggcccacaactggggctttgccattttcctcctcggtgttgtaggcctttgcgccttcatgctcggcgtgtccagcctcctcgggtcaaaagcctggggccgcagcaaaaacgaaccgttcgaatccggcatgctgcctacaggtggcgcccgcttgcggctctcagccaaattctatctggtcgcgatgttgttcgtgatcttcgatatcgaagccctctttctctttgcatggtctgtgtccgtccgcgaaagcggctggaccggattcgtcgaagctctcgttttcatagcaattctgttggcaggtcttgtctacctgttccgagtgggcgcccttgactgggctccggaagctcgtcgcaagcggcaagcgaagctgaaacaatgaggctttggcaatgcaatacaatctcaccaggatcgacccggatgctcctaacgagcagtaccccatcggcgaacgggaaaccgtttccgacccgttagaagaccaagtccacaaaaacatctacatgggcaagctggaagacgtgctgagtggcgcggtcaactgggggcgtaaaaactccctgtggccgtacaacttcggcctttcgtgctgctacgtggaaatgaccaccgccttcacggcgccccacgacatcgcgcgctttggcgccgaagtgatccgggcctcgccgcgccaggcggatttcatggttatcgccggtacctgcttcatcaagatggcgccgatcatccagcgtctctatgagcaaatgctcgaaccaaaatgggttatctccatgggttcgtgcgccaactccggtggcatgtacgacatctactcggtcgttcaaggggtggacaagttcctgcccgtggacgtctacgtgcctggctgcccgccccgtcccgaagcgttcctgcaaggcttgatgctgttgcaggaatcgattggcaaggagcgtcgcccactgtcctgggtggtcggtgatcaaggcgtttatcgcgccgagatgccgtctcaaaaggaacagcgccgcgaacagcgaatcgcagtcaccaacctgcgcagccccgacgaagtctgatccagcaccgcttcttttatagaacgaaaacctggcttcattctttacgttgaccgaaagcgataaaaaaccatgactacaggcagtgctctgtacatcccgccttataaggcagacgaccaggatgtggttgtcgaactcaataaccgttttggccctgacgccttcaccgcccaggccacacgcaccggtatgccggtgctgtgggtggcgcgtgccaggctcgtcgaagtcctgaccttcctgcgcaacctgcccaagccgtacgtcatgctctatgacctgcatggcgtggacgagcgtctgcgcaccaagcgccagggcctgccgagcggcgccgatttcactgtgttctaccacctgatgtcgctggaacgtaacagcgacgtgatgatcaaggttgccctgagcgagagcgacctgagcatcccgaccgtgaccggtatctggccgaacgccagctggtacgagcgtgaagtctgggacatgttcggtatcgacttccccggccacccgcacctgacgcgcatcatgatgccgccgacctgggaaggtcacccgctgcgcaaggacttccctgcccgcgccaccgaattcgacccgttcagcctcaacctggccaagcagcaactggaagaagaagccgcgcgcttccgccccgaagactggggcatgaagcgttccggtactaacgaggactacatgttcctcaacctgggcccgaaccacccttcggcccacggtgctttccgtatcatcctgcaactggacggcgaagaaatcgtcgactgcgtcccggacatcggctaccaccaccgtggcgccgagaagatggccgagcgtcagtcctggcacagcttcatcccgtacaccgaccgtatcgactacctcggcggcgtgatgaacaacctgccgtacgtgctctcggtcgagaagctggccggtatcaaggtgccggaccgcgtcgacaccatccgcatcatgatggccgagttcttccggatcaccagccacctgctgttcctgggtacctatatccaggacgtcggcgccatgaccccggtgttcttcaccttcaccgaccgtcagcgcgcgtacaaggtcatcgaagccatcactggcttccgtctgcacccggcctggtaccgcattggcggggtggcccacgacctgccgaacggctgggagcgcctggtcaaggaattcatcgactggatgcccaagcgtctggacgaataccagaaagccgccctggacaacagcatcctcaaaggccgcaccatcggcgtcgcgcagtacaataccaaagaggccctggaatggggcgtcaccggtgccggcctgcgttccactggttgcgacttcgacctgcgtaaagcgcgcccatactccggctacgagaacttcgagttcgaagtaccgctggcggccaatggcgatgcctacgaccgttgcatcgtgcgcgtcgaagaaatgcgccagagcctgaagatcatcgagcagtgcatgcgcaacatgccggccggcccgtacaaggcggatcacccgctgaccacgccgccgcccaaagagcgcacgctgcagcacatcgaaaccctgatcacgcacttcctgcaggtttcgtggggcccggtgatgccggccaacgaatccttccagatgatcgaagcgaccaagggtatcaacagttattacctgacgagcgatggcggcaccatgagctaccgcacccggattcgtaccccaagctttgcccacttgcagcagatcccttcggtgatcaaaggcgagatggtcgcggacttgattgcgtacctgggtagtatcgatttcgttatggccgacgtggaccgctaagcatgaacagcacgcttatccagacagaccgtttcaccttgagtgaaaccgagcgctcggccatcgagcacgagctgcatcactacgaagacccgcgcgcggcgtctatcgaagccctgaagatcgtccagaaggaacgtggctgggtgcccgacggcgccctctacgccatcggcgagatcctcggcatccccgccagcgacgttgaaggcgtggccacgttctacagccagatcttccgtcagccggtgggccgccacatcattcgcgtgtgcgacagcatggtctgctacatcggcggccatgagtccgtggtcagcgagatccagaacaagctgggcatcggcctcggccagaccaccccggacggccgcttcacgctgctgccggtgtgctgcctaggcaactgcgacaaggcgccggcgttgatgatcgacgacgacacattcggtgacgtacagcccgctggcgtcacccaattgctcgagggctacccatgaccctgacttccttcggcccggccaacctgatcaagcgttcggccgagactcaccccctcacctggcgcctgcgtgacgacggcgagccggtatggctcgacgagtaccaggccaagaacggctacgcggctgcgcgcaaagccttcgccgacatggcccaggacgatatcgtccagaccgtgaaggacgccggcctcaagggccgcggcggtgcgggcttccccactggcgtgaagtggggcctgatgcccaaagacgaatccatcaacatccgctacctgctgtgcaacgcagatgaaatggagcccaacacctggaaagaccgcatgctgatggagcaactgccccatctgctgatcgaaggcatgctgatcagtgcccgtgcgctgaaaacctaccgtggctacatcttcctgcgtggcgagtacaccaccgccgccaagcacctcaaccgtgccgtgcaagaagccaaggccgcaggcttgctaggcaagaacatcctcggttccggctttgacttcgaactgttcgtgcacaccggcgccgggcgttatatctgcggtgaagaaaccgcactgatcaactccctcgaaggccgccgcgccaacccgcgctccaagccgcccttccccgccgccgtgggcgtgtggggcaagccgacctgcgtgaacaacgtcgagaccctgtgcaatgtgccagcgatcatcgccgacggcgtggactggtacaaatccttggcccgtgaaggcagcgaagacatgggcaccaagctcatgggcttctccggcaaggtcaagaaccctggcctgtgggagctgccgttcggcgtgaccgcgcgcgagctgttcgaggactacgccggcggcatgcgcgacggctacaccttgaaagcctggcagccaggcggcgccggtaccggcttcctgctccctgagcacctcgacgcacagatgtatgccggcggcatcggcaaggtgggtacccggatgggtactggcctggcgatggcggtcgacaacacggtgaacatggtctcgctgctgcgcaacatggagcagttctttgcccgtgaatcgtgcggtttctgcaccccatgccgcgacggtctgccgtggagcgtcaagctgctgatggccctggaaaatggcgaaggccgcgagggtgacatcgaaaccctgctgggcctggtcggcttcctcggcccaggcaagaccttctgtgctcacgcaccgggcgccgtggagccattgggcagcgcaatcaaatacttccgctcggagttcgaagccggcatcgcgcccaccagcgccgccgtcccgcctctggcgaagccgatcgtagtcggcgcgtaacgcttaaacaggcgaagggtccgtgcccttcgcctgctcatgtgctgacgccttcaaggctgtgtagatgcacatgaataacaagattccattagccacgcccgctgacaacgggccaacgaagaactttgaaccatggccactatccacgtagacggcaaagcgctcgaagtcgatggggcggacaacctgttacaggcgtgtctgtcactcggcctcgacatcccgtatttctgctggcaccccgcgcttggtagcgtcggtgcctgtcgccagtgtgcggtcaagcaatacaccgacgagaacgacacccgtggtcgtatcgtcatgtcctgcatgaccccagccaccgacaacacctggatctccatcgacgatgaagaatccaaggcattccgcgccagcgttgtcgaatggctgatgaccaaccacccccacgactgcccggtctgtgaggaaggcggtcactgccacctgcaagacatgacggtgatgaccggccacaacgagcgccgttatcgcttcaccaagcgtacccaccagaaccaggacctcggcccgttcatctcccacgagatgaaccgctgcatcgcctgctaccgctgcgtgcgcttctataaagactacgccggcggcaccgacctgggcgtgttcggcgcccacgacaacgtgtacttcggtcgcgttgaagacggcgtgctggagagcgagttctccggcaacctcaccgaggtctgcccgaccggtgtgttcaccgacaagacccactccgagcgctacaaccgtaagtgggacatgcagtttgcaccgagcatctgccatggctgctccagcggttgcaacatctccccgggcgagcgctacggcgaactgcgtcgcatcgaaaaccgcttcaacggttcggtcaaccagtacttcctgtgcgaccgtggccgtttcggctatggctacgtcaaccgcgaagaccgcccacgccagccactgttggccgatggcgccaagctgagcctggacgccgcgctggataaggccgccgacctgttgcgcggccgtaacatcgtcggtatcggttcaccacgtgccagcctcgaaagcaacttcgccttgcgcgagttggtaggtgccgagcacttctacagcggcatcgaagccggcgagctggagcgcattcgcctggtcctgcaagtgctgaacgacagcccgctgcccgtgccgaacatgcgcgacatcgaagaccacgacgcgatcttcgtactcggtgaagacctgacccagaccgccgcacgtatcgcgctgtccctgcgtcaatcggtcaaaggcaaggccgaagaaatggccgacgccatgcgcgtacagccgtggctcgacgccgccgtgaaaaacatcggccagcacgcgctgaacccgctgtttatcgcttctctggctgaaaccaagctcgacgacatcgccgaagaatgcgtgcacgctgcgccggacgacctggcccgcctcggtttcgccgtggcccatgccctcgacgccagcgcgcctgcggttgaaggcctggacgctgaagccgtcgaactggcccagcgcattgccgacgccctgctggcggctaagcgtccgttgatcattgccggtacctcgttgggttccaaggcgctgatcgaagccgctgccaacatcgccaaggccctgaagctgcgcgacaaaaacggttccatcagcctggtagtgccggaagccaacagtctgggcctggccatgctcggtggcgagtccgtggacgcggcgctgcaagccgtgatcgacggcaacgccgacgccatcgtggtactggaaaacgacctgtacacccgcaccgctgcggccaaggttgacgctgcgctcaacgccgccaaggtgctgatcgtcgccgaccatcagaagaccgccaccagcgaccgcgccgacctggtgctgccagccgccaccttcgctgaaggcgacggtaccctggtcagccaggaaggccgcgcccagcgcttcttccaggtgttcgatccgaagtacatggacgccagcatcctggtgcacgaaggctggcgctggctgcatgccctgcgcgccaccctgctgaaccagccgatcgactggacccagctcgaccacgtcaccgctgccaccgccgccagcgcgccgcagcttgcccgcatcgtcgatgccgcgccgtccgctgcgttccgcatcaagggcctgaaactggcgcgtgagccgttgcgttactccggtcgtaccgccatgcgtgctgacatcagcgtgcacgagccgcgtaccccgcaagacaacgacaccgcgtttgccttctccatggaaggttattcgggttcggccgagccgcgtcagcaggtgccgtttgcctggtcgccgggctggaactcgccgcaagcctggaacaagttccaggacgaagtcggtggtcatatccgcgctggcgacccgggcacccgcctgatcgaaagcagcggtgactcgctgaactggttcgctgcggtaccgcgtccgttcaacccggcgccgggcacctggcaggtcgtgccgttcttccacctgttcggcagcgaagaaacttcttccaaggccgcgccggtgcaagagcgtattcctgccgcctatgtgtctgtcgccaagtccgaagccgaccgcctgggcgtcaacgacggtgcgctgctcagcctgaacgtggccggccagaccctgcgtctgccgctgcgtatcaatgacgagctgggtgccggcctggttgcactgcccaaaggcatcgccggtattccgcctgccattttcggcaaaaccgttgacggtctgcaggaggcagcgcaatgacttggttcacgccggaagtaattgacgtgatcatctcggtggtcaaggccatcgtgatcctgttggccgtggtcgtcgcgggcgcgttgctcagcttcgtcgaacgtcgcctgctgggctggtggcaggaccgttacggtccgaaccgcgttggcccattcggcatgttccagatcgcggccgacatgctgaaaatgttcttcaaggaagactggaccccgccgttcgccgacaaggtgatcttcaccctggcaccggtggtagccatgagcgccttgctgatcgccttcgcgatcatcccgatcaccccgacctggggcgtggcggacctgaacatcggcttgctgttcttcttcgccatggccggtttgtcggtctatgccgtgctgttcgccggttgggccagtaacaacaagttcgccctgctgggcagcttgcgggcctcggcccagaccgtgtcctacgaagtgttcatgggcctggccctgatgggcatcgtggtgcaggttggctcgttcaacatgcgcgatatcgtcgagtaccaggcgcagaacctgtggttcatcattccgcagttcttcggcttctgtactttcttcatcgctggcgtggccgtgactcaccgtcacccgttcgaccagccggaagcggaacaggaactggccgacggttaccacattgaatatgccggtatgaaatggggcatgttcttcgttggtgagtacatcggcatcatcttgatctcggccctgctggtcacgctgttcttcggcggctggcacggtccgtttggcatcctgccgcagttggccttcttctggttcttcttgaagaccgcgttcttcatcatgctgttcatcctgctgcgcgcctcgattccgcgcccgcgctatgaccaggtgatggatttcagctggagattctgcctgccgctgaccctgatcaatttgctggtgacggctgccgtcgtgttgttgaacacgcccgctgccgcggttcagtgaggatttgacccatgttcaaatatattggcgacatcgttaagggtaccggtacccagttgcgaagcctggtgatggtgttcggtcacggctttcgcaaacgcgacaccctgcaataccccgaagaagcggtgtacctgccgccgcgctatcgcggccgcatcgtactgacccgcgaccccgacggcgaagagcgttgcgtagcctgcaacctgtgcgccgtggcgtgcccggtgggttgcatttccctgcagaaagctgaaaccgaagacggtcgctggtacccggacttcttccgtatcaacttctcgcgctgcattttctgcggcctctgcgaggaagcttgcccgaccaccgcgatccagctcacaccggatttcgagatggccgagttcaaacgtcaggacctggtgtacgagaaagaagatcttttgatctctggtcccggtaaaaaccctgattacaacttctatcgtgttgcaggtatggccgttgccggtaagccgaagggcgccgcacaaaacgaagccgagccgatcaacgtgaagagcttgctgccttaaggaagaaagatggaattcgctttctatttcgcatcgggtattgcagtggtgtccacgcttcgcgtgatcaccaacactaaccctgtgcacgccctgctctacctgatcatttcgctgatcgccgtggccatgacgtttttcagcctcggcgcaccgttcgccggagtgctggaagtgatcgcctacgccggcgccatcatggtgctgttcgtgtttgtggtgatgatgctcaacctggggccggcttcggtcgcccaggagcgcgtctggctcaagcccggcatctggctcggcccggttgtgctcgcagccctgctgctgggtgaactgctgtatgtgctgttcgctcaccagagcggccaggccatcggccacaccaccgtagacgcgaaagccgtgggcatcagcctgttcggcccgtacctgctggtggttgaactggcttcgatgctgctgctcgccgcagccatcacggccttccacttgggccgcaacgaagccaaggagcaatgacgatgcctgctatccctttggagcatggtctggcggtcgccggcatcctgttctgccttggcctggtcggcctgatggttcgccgtaacattctgttcgtgttgatgagcctggaaatcatgatgaacgccgcggcactggcgttcatcgtggcaggcgcacgttggggccagccggatggacaagtcatgttcatcctggtgatcagcctggcagccgccgaagccagtattggcctggcgatcctgctgcaactgtatcgtcgcttccacacgcttgatatcgacgctgccagtgagatgcgcggatgaacatgatctttctgactttcgtattccccctgatcggtttcctgctgctgtcgttctctcgcgggcgctggtcggaaaacctctcggccctgatcggcgtgggctccatcggcctgtcggccatcgtggccgcctacgtcatctggcaattcaatgtggcaccgcctgaaggcggtcactacaccctggtgctgtggcagtggatggcggttgaaggcttcaagcccaacttcgccctctacgtcgacggcctgtcgatcaccatgctcggcgtggtggtgggtgtgggcttcctgatccacttgttcgcgtcctggtacatgcgcggtgaagcgggctactcgcgcttcttctcgtacaccaacctgtttatcgccagcatgctgtttctggtgctgggcgataacctgttgttcctgtacttcggctgggaaggcgtgggcctgtgctcgtacctgttgatcggtttctactacagcaaccgcaacaacggtaacgcggcactcaaggcatttatcgtcacccgcatcggcgacgtgttcatggccatcggcctgttcatcctgttccaacaggtgggcacgctgaacatccaggaactgctggtactggctccgcagaaattccaggtcagcgacttctggatcaccctggcgaccctgatgctgctgggcggcgccgtgggtaaatctgcgcaactgccgctgcaaacctggctggcggatgcgatggccggccctaccccggtatcggcattgatccacgccgccaccatggtgaccgccggtgtctacctgatcgcccgtacccacggcctgttcaccctggcgccggacatcctgcacctggtgggcatcgtgggcggcgtgaccctggtgctggccggcttcgccgcgctggtgcagaccgacatcaagcgtatcctcgcctactcgaccatgagccagatcggctacatgttcctggcccttggcgtgggcgcctgggacgcggcgatcttccacctgatgacccacgcattcttcaaggccctgctgttcctcgcctccggtgcggtgatcgtggcgtgccaccacgagcagaacatcttcaagatgggcggcctgtggaagaaactgccactggcctacgccagcttcatcgtcggtggtgccgccctggccgccttgccgttggtgaccgccggtttctactccaaggacgaaatcctctgggaagctttcgccagcggtaaccagaacctgctgtacgcaggcctggtgggtgcgttcatgacctcgctgtacaccttccgcctgatcttcatcaccttccacggtgaagccaagaccgaagcgcacgcaggccacggcatctcccactggctgccactgtcggtgctgatcatcctgtcgaccttcgtcggcgcgatgatcactccaccgctgcacggtgtgttgccacagagcgtcggccatgccggcggcgaagcccagcacagcctggaaatcgcctcgggcgccatcgccatcgccggtatcctgctggcggccctgctgttcctcggcaagcgtcgcttcgtgaccgccgtggccaacagtggcattggtcgcttcctgtcggcctggtggttcgctgcctggggcttcgattggatctacgacaaactgttcgtcaaaccttaccttgcgatcagccacgtgctgcgcaaagacccgctcgaccagaccatcggtttgatcccgcgtgccgccaaggccggtcacaccgccctgagccgcagcgagaccggccaattgcgttggtatgcagcttccatggccgtcggtgccgtgctggtgatcggcgccatcgtggtggtagcggtatgactatgaacattgcgtactttgcgaacttgcaaaaggaaacgagcccgtcatgattctgccctggctaatcctgatcccctttatcggcggcctgctctgctggatgggtgaacgcttcggcgccaccctcccccgctggattgcgttgctgaccatgtccctggaactcgcgctcggcctctggctgtgggcccatggtgactattcattcgctccggcaccgggtgtcgaccccaccttcgcgcttgaattcaagcacgtgtggatccagcgcttcggcatcaacgtgcacctggccctcgacggcctgtcgctgttgatgatcctgctgaccggcctgctgggtatcctctcggtactctgctcctggaaagagatccaacgtcacgtgggcttcttccacctgaacctgatgtggattttgggcggtgttgtcggcgtgttcctggcgctggacctgttcatgttcttcttcttctgggaaatgatgctggtgccgatgtacttcctcatcgcgctctggggtcacagctcttcggacggcaagaaaacccggatctacgcagcgaccaagttcttcatcttcacccaggcttccggcctgatcatgttggtggcgatcctgggcctggtactggtcaacttcaacaacaccggcgtgattaccttcaactacgccgacctgttgaaaaccaagatgtcgctgaccaccgagtacgtgctgatgctgggcttcttcatcgccttcgcggtgaagctgccggtggtgccgttccactcctggttgcctgacgcccacgcccaggcgccgactgccggctccgtggacctggccggtatcctgctgaagaccgctgcctacggcctgctgcgtttcgccctgccgctgttcccgaatgcttcggccgaattcgcgccgatcgccatgaccctgggtctgatcgggatcttctacggtgcgttcctggctttcgcgcaaaccgacatcaagcgtctgattgccttctcgtccgtttcccacatgggtttcgtactgatcggcatctactccggcagccaactggcgctgcagggtgcggtgatccagatgttggcccacggtgtttccgccgctgccctctttatcctgagtggccagttgtacgagcgcctgcacacccgtgacatgcgtgagatgggtggcgtgtggtcgcgcatcgcgtacctgccggccatcagcctgttctttgccgccgcgtcgctgggcttgccgggtaccggtaacttcatcggcgagttcctgatcctgatgggtgcctttgtgcaaacgccgtggatcagcgccatcgccacctccggcctggtgttcggttcggtctactcgctgatcatgatccaccgcgcctatttcggcccggccaagtccgacaccgtcctgcaagggatggatgcgcgcgaactgatcatggtgctcggccttgcggtactgctggtcttcatcggcgtgtacccgcaaccgttcctggacacttctgccgcaacgatgcatggcgtgcagcagtggttcggcaccgccttctcccaactcgcttcggcccggtaagagcgctatggaattcacgatccaacactttatcgcgcttgcgccgctgctgatcaccagcctcaccatcgtggtggtgatgctggcgatcgcctggcgccgcaatcattcgcaaacgttcctgctgtcttgcgccgggttgaacctggccctgctgtcgatcattccggccctcaaggtcgcgccactggcggtcacgccactgatgatggtcgatgacttcgcactgctgtacatcgccctgatcctggtggcgaccctggcctgcgtcaccctcgcccacgcctacctcggcgaaggcggcaccggctacccgggcaacaaggaagagctgtacctgctgatcctgctggctgcggccggcggtatcgtgctggtcagcgctcagcacctggcgggcctgttcatcggcctggaactgctgtcgatcccgacctacggcctggtggcctatgccttcttcaacaagcgctccctggaagccggcatcaagtacatggtgctgtcggctgccggttccgcgttcctgttgttcggtatggccctgctctacgccgaagctggcagcctgagcttcaccggtatcggccacgccctggccgccaccaacagcccggcgccgattgcccaactgggcctggcgatgatgctgatcggcctggcgttcaagctgtcgctggtgccgttccacctgtggaccccggacgtgtacgaaggcgccccagcgccggtggcggcgttcctggccactgcgtcgaaagtggcggtgtttgcggtgatggtgcgtctgttccagatctcccccgccgccaacaccggcgtgctgagcaacgtgctgaccgtgatcgccatagcgtcgatcctgttcggtaacctgctggccctgacccagaacaacctcaagcgtctgctgggctattcgtccatcgcccacttcggctacctgctgatcgccctggtggcgagcaaaggcctggccgtggaagccattggcgtgtacctggtcacctacgtgatcacaagcctgggtgcgttcggcgtcatcaccttgatgtcgtcgccgtacaaaggccgtgacgccgacgccctgtacgaataccgcggcctgttctggcgccggccgtacctgaccgccgtgctcaccgtgatgatgctgtccctggccggcattccgctgacggcgggctttatcggcaagttctacatcgtcgctaccggtgtcgaagcccacgaatggtggctggttgcctcgctggtactgggcagcgccatcggcgtgttctactacctgcgcgtgatggtcaccctgtacctgatcgagccaaacctgcgccgtgtggatgccgagctgcattgggaacagaaagccggtggcgtcatgctgctggccatcgccctgctcgcgttcttcctgggcgtgtacccacaaccgttgctcaccctggtgcagcacgcggtgctgggcgtttgatcgcttagattaatgcagtaaacataacggcgcctttgggcgccgttttgcatttctgtagcctggctttttcccttccctactcgctgaaatttcctcttcaatctgcctcctcatccggcatcttccccgctggatgcggcctaaggtgtctgcgttttaagaaagttcccacagcttgggcgcttgacccaaagcgagtgggccaccaaactatacgcagactacgtacagaacatggatgctctatttatcgaactgccggcattcgaacggcatcgcagggactatctgagcgatgaactttttcacggttttcagcaggagttgatgaaaaacccagaagcgggagacgtgatcgaaggaacgggcgggttgagaaaggttcgcttcgtcgatgagcgacgaaacaaaggcaagcgcggtggcctgcgggtcatttactactggtggtcaggcggtacgcaattctggttattcactttgtacggcaaacacgaacagaacgacctgacaccccaacacaagaaagcccttaaacacatgctagacagggaaatcaaagcgagaacacaccatgaaacgtgaaatcttttccgaactggtcgaaggcttcgacgccttggctgatgaacgccagggcaaaattaccctgcgcacccacaaagcgcacctcaacaagctggcgccactcagcgctgacgaggtaatcgccgtacgccagcaactcaacctgtcccgctcggtattcgccatgtacctgcgcaccaacacccgcaccttggagaactgggagcaaggccgggccaagccgaatgcgcaggctgtcacgttgatacgactggtggcgcgctttccggaaaccgtggcgcaacttgccgcattgggctgaccggcaatagccgcaaaaaaaacgccccgagcattcggggcgtttttgcagcgcaaacagcgttagaacgcgatacccaccttgaaaccatactcatcacgcttgagcttggtgttgtcggccacataggagtcgttatcgagcttgtactcggtgcgggtgtagtacaggcccgccatcactggcaggtcgcccttctggttcatcagcaggctgacttcggcgtaagggttggtgcggtccttgaggtctacggtgtcgctgccgacgccgtcgaccttgagcttggcgcggccgtcgatggtgtgacgggcgccggcttcaacgcgcagggtcatgtcatcgaactggtggttgtagcccagcgccgccttggcaaacggcgatttgttggtgagcttcatgtcgtagccattggtgtccggctcgtagcgggtccagctgtagccaccgcccacgatcacgtcgacaaaattgcgcgcatccagcgcggcacgccagccgaggtcgaggtcggcctggccttccttgagtttgttatcgcttttttcaccgtacttggcttcgataccggccaggtagataaagcccgactcggcagtgagcttgttgccgaagttgtagaacaggccggcttcgggcatgtgatctttgtcgctttcgctgccgccttcaagtttgaagtcgttgtagctgcccatgatcccgaacgtggaaatcgggtcagtggaaggtgctgcgaacaccacgccaggcgcagctaccagggccagcaacgaggtgttcttgaggaattttccgaatagtttggacatcgttttacatctccattttaaggtgggcaaagtattcaggaatcggttcgaaccttggcttttgcaaaaagttcgaacggatttgcaccaaaacggaggaaaaacgattcagcgaaggctctaactcaagactcttcaggattcatgcgaatcaggtgttcaacggcttcgcgaagttgaggctgctccggcagccgaatgccgaaggtgtcgcgcaacagtcccagtaactcatcggcactcttgagcgtgcgcttttcgctgggtcgatccagataatgaagggcatagcgggcgttggccaaggtatgacgtttaccgggcgcaagcagcgcggctttcaactgccctacgaacggtgagccagggtgcgtggagacgtaccagttgccgatttcataatcgatgtcggcctgggtttgcaggtcgaacacatacaggccacgccattcttcacccacctggccccatagcgtgtaactgccttggttgtgtgtcagacgaaagcactcatgagcggtgacctggggcgcgtcgctgtccagttgcaacgggctgctgggcaccatgccgccaaaaccgacatcggtgatatagcgcacgccgtcgagggtcaccaggctcaagcggtgggtacgcccggtgtgggcgtccggtgggccgccgatcacaacgcgcccggtgataccacgggcttcaaagcccagctcctgcaatagggccaggaacagctggttcagctcgtagcaatagccgccacgcccctcatgcagcaccttacgctcgacgctgggcaggtcgatcggcaccggtgcatgcatcagggtcgacaggctttcaaaggcgaaggtgcacacatggcgcagttgcaggtcccgcagggtttgcagggtgggcggcggtggcgaggcatagcccaggcgttgcaggtacaggcggctatcggcgagtgtgtgcatggcgcgatccttgggcgcagggcaagagcgtcactatgccgcgcctctgtgtgcgttgtcattttgaatgaaccttttggagcgccagcctatccatctataacaagattgggaggcaacatgagtaccgcaaaaatctacaccgtccactatcagctacacggtaaacccaagtctttcgtggtgcgcgccgaggtgatgaacaacgccgaggcctggcattgggcggccgttgatgccgacattgcccatgtcagccgcatcggtcgcgtgggtcacgagcaggtgaaaaagaccacccggccctgggcggaaaaatacggcatcagcgacgtcagctggtccccgcccagataaacaaagccccgcacacaggcggggctcggttcactgcttcaagtcgcccaacggatcgtagggcggcttttttttcgctgtctcctcgtccgttttgtccagcggcgcaattgccgggccgatcgggtcgacctgcgggtcggccaggtccggcgagtccgggtcgaagcccagttcatccttgccactggcgtgttcgttggaatgggggccatcggtacgcttgttcatcaggttctcctgttaaagcggacgggctttgtcgtggaggttttccaggtcttcttcggcgcgctgcacatcgtcgtccgggcctcgttctttcggatcattggggcgcaacgcatcgttgtcgcgctcctcttcaccgggggtgcggtgcgggtcgggtgtaccaggcggtggctgtttatagtcgggcatgacggctgacctcatgaagggttcaccgttttagagaaatcgcccgccgccatcgttcaacttcattgcgccaagcatgagaagatgaccgctctttctggagacctgccccggatgttcgagctcaaaccctgcgaccccgccacctatcgccaacagacccgtcgcagcacactggtcattgccgtgctgttcctggccttggccatgctgttatcgagcctggcagtgatgctgttcggtgagcctggcggtgataattttcgcttcaacgtcggcggcgtctttgccggggtgttgatcaccgtcgcgctggtacgtggcccgttctggacccaaccctggatgacgtcggcggtgtatggctggcagctcaaacgcagcctgatgagcgtgaccaatgtgatgcacaaggtcagcgaacgggtacaggccaacgacccgtcagccatcaagctgttgcgtttctatcatctggggctgattcagatgcacgaactggacgccaactccagcgcccaggcgcaaatggtgggcgagatcgaggcccacaaggcgaagatgcaggccctggggatcgctaccgagcaaacccggcttgatcctgcctggctggacagcctgaaaagcgcttagctccgcagggacacgtcagtgggccatttggcccgccagcaaaacactgcactcagggcaatcgccgcacccgccaggccaaacacccagggcgccgaggccacaggtagcaacaggcccgccagcagcggcccgaggccggcgccgatatcgcgccatacggcgttggacgccaatgcagacacgcgcatggcgccggggttgcgctcggccaccagggtagtcaccaggggcaattgcaacgcacgcagcaccagcaccgccgccgcgccgacgatcacccaatggctgccgaacgcagccagggccagggcgctcaagaacgaaaacagcaacagcatcgacgtggcaccgaaacgctgggccgcacgcccgcccaacgggctcaggagcaattccgacaggtagcgcaggcccatcaagccgccggcgatcagtaccgcatccccgcccatgatcttctgcgcctggatcgacaggccaaagataaacaagccgtccagcgcgacaccttcgataaacgaccacagcgcaacgctgtcaggccacctgaagcggcgccccggagtgctgtgcaagtcatgaccggaggtgggcaggccgcgagcgatccacaaccctgccaggcaacagacggcgagaatcaggaagatcgggcgcggcccggcccataacgtcagcaacccgcccagaggcagggccagcatcggcccgaaggcgatcaatgcccgtgagcgccccgccctgcgcgccgccccttcaggttcagacgtcgccagtacctgggtcgacaggttcaacgcggcaaaacacaggccccacaccagccgcaagaccaacagcgcagcgaagcccgacagcaccgaattacccaatgcgcacagtgctgccgcgccggcggcgagcatgcaggtcaggcggtcgccgttacgtgcataaaaattcagtacatgccgataaccaaagatccgtaccagacggttagccgccaacaacaccccagcctgggccagcgtgatgccgaacgcctcggattccatgggcagcaacaggtacagcagcacatcactgggcaggcaaaacccgagggtcagtgccgcgcggcgcgaggtggtattggcggtgcgttgggcaaggctggacataaaactgaaacattcagaaatattcaggccgccacactagccttcccctggccttttttacaagggctgagtcttgtgcttagaaagcgcccccgctgctagacacaagcaaaatcagatatttcttacatctctttcggctgatcgttcccaccctagtgccctcaacccgtctgagaaccttcccgatgtgcaaccgccctgttcacctcaaagaccgtcgaaacttcctacgcctggctgccgtcagtacaagcgcaacgctactaagcggggcgctgccctccctcgcgaacgcaacatcggcggcgccagcgctgcccaagcccgccaacgacctcagcccccaacttgccttgcagcggctgatggaaggcaaccagcgttacgccgacggggtgaccaagcgtcatgactttatgatcgagcgtgaagtgttggtgggtgggcaaaatccgttcgtcgcggtgttaagttgtgccgattcgcggatcgctcccgagtacgctttcgacaccgcccgcggcgacctcttcgcggtacgggtcgcgggcaatttcgtcaccgataacgggctcgccagccttgaatacgcggtggcggtattgggcacgcccctgatcatggtattggggcacgacatgtgtggcgcagtcgcggcgggggtcaaggccgtcaaggataacgcccgcttcccgggcaagatccagggcttggccgatactttcaaaccctcggtgaacaaggtattgaaagcgcccggcgatttgctggaaaacgccattgcacaaaatgtcaccgacaccatggcgcggctcacggctgaatcaagcctgttggctgatgcggtcgcggcgggaaaactgctgattgtcggcggcgtgtacaagctgcacagcggcaaagtaaaaatgctcggttaggctttgcgtaggagcgagcttgctcgcgaaaaactcgaaggcgccgcgttgagtcaggcggcgcgcgttatcgttgacgcttttcgcgagcaagctcgctcctacagggggcaatgatcgctcaaggaagcggcgtctcaaaaaccacgcccagatccaggcgcccgtccttcagcggcgggcaccagtaataaccccccgtcaacggcttgctgatgcgatacaggccatcgacaatcccatcttccaacccactcatgcgtcgcaactgcgcttcgaacgcatcgaaagaatgaccaaacgcgaggaacatcagccccgcctggccattttcggcccagggcatggagcggcgcaccacgaaggcttccggtgtgaagctttcctgggcggtgcgcttggtgtgggccgactcgggggcatcgtcgagttcttcgttatcgccatgacggcggccaatgatgtggtcacgctcctgggcaggcaacgcggcaaaaccgtcaaggtcgtgctgccattgctggatagcagcgaagctggcgccgctgtcggtcagcgcggcttccacggcggcatcgtcgtgagggttttcggtgccgtcttcgtagtcggtcaggtcaaagccggtcttgtagcggaagccttctgtcgactgcaccaggcgaaacgccggggccagggctttttccacggtccggctgcgcagcagcaactcaccgcgatccaccccatgcagccatacccacagcgcctgttgagtcgacgggttgtgggcgccagggccgctgacggccgggaatgagcgcagccctgggatctggacacccagcgccgttaccagcggctcaccgaaccccaccacggccgccgcatccgtcaactgcaccagtgcgtccagcgcagcgggcacggcttgcagcgagtcgagggcaaaaaacagatggcgggcctgcaaaggcaccggtgcggcaagaatgcccggctggtactgactcatgtgaactccttctgaaaagccgcgcagtttacccggcgtacaccgcgctgcgaacaagaatgcgcgcaagccttgcgttagagccgcgtgttgggtgactctctagtcatgttttgcaactattccaggggtagcgacatgaccaccagcaacctgctcgcccagctgtttcccacctccaccgcgcagattcccgagcaatttcgcctggcagcgcccattgagcaacgtgaatacctggtcgatggccagttgcaggagtggaacggcccgctcgcccgcgtgcaaagccccgtgcaactgggtgatgagcgcgtgcacatcggcagcacgccgttgctggatgccgacaccgccctcaccgccctggatgctgccgtgcgcgcctacgaccgtggccagggtgtatggccgacgatgcgggtggttgagcgtatccagcacgtcgaggcgttcctgcggcgcatgcgcgaacagcgtgatgcggtggtcaagctgctgatgtgggagatcggcaaaaacctcaaggactcgcagaaagaattcgaccgcacctgcgactacatcaccgacaccatcaatgccctcaaggaactcgaccggcgcagcagtcgctttgagctggagcaggacaccctcggccagatccgccgcgtgcccctgggcgtggcgttgtgcatggggccttacaactacccgttgaacgagaccttcaccacgctgatcccggcgttgatcatgggcaataccgtggtgttcaagccggccaagctgggtgtgctgttgatccgccccttgctggaagccttccgcgacagcttcccggccggggtgatcaatgtgatctacggcagcggtcgcgagaccgtgagcgcgctgatggccagcggcaagatcgacatctttgcgtttatcggcaccaacaaggccgccagtgatttgaaaaagctgcaccccaagccgcaccgtttgcgcgctgcgctgggcctggatgccaaaaacccagggatcgtgctgcccgaagtagacctggacaatgcggtgaacgaagccgttaccggttcgctgtcgttcaacggccagcgttgcaccgcgttgaaaatcctgttcgtgcatgaagacgtggtcgagcgctttatcgagaagttcaacgccaagctggcgacgctcaagcccggcatgccctgggaagacggcgtggcgctgacgccactgccggaggtgggcaaggtcgattacctcaacgaactggtggccgatgcggcgcgccatggcgccaaggtgatgaatgccgagggtggcagcagccgtggctcgttcttctacccggcggtgctgtacccggtgaacccgcagatgcgtgtctaccacgaagagcaattcggcccggtggtgccgatcgtgccctaccgtgacctagaaaccgtgatcgactacgtgctggactcggatttcggccagcagctgagcctcttcggcaccgaccccgtggaagtcggacgcctggtggacaccttcgccaaccaggtgggccgcatcaatatcaatgcccaatgccagcgcgggccggatacctttccgttcaacgggcgcaagaactcggccgagggcacgttgtcggtgcatgacgccttgcgtgtgttctcgatccgcaccttggtggcgaccaagttccaggaaagtaacaaggcgttggtcagcgacattttgcgcaatcgagactcgagtttcctgaccaccgactacatcttctaagatcaaccccgtttcaatgtgcagacaggtcagtgtggcagctggcttgcctgcgatgctggcacctcggtctttcagtcaggtcgcggtgatgctatcgcaggcaagccagctcccacatttgatcgcgcatactcagataatcgaggccactttaatactgatgaacctgcccttctttgcccggcgcctgctgcgccccttgctcgacccctaccgccgctttcgccatgccaagctgatccacgccgcgcgcgtgtccgtgggtttgctggcaaccatcctgctgaccaccggcctcaacctgccgcacggtgaatgggcgtcggtgaccatgctgattgtcatcggcgggctgcagcaccacggcaacatcggcaagaaagccgtcgagcgcgcctacggcaccttgatcggcgccagcgtcggcttgctgctggtggtgcaacaggcttacttcggcctgccgttgctcacctacctgctgatgtcggtggtgtgcgggttcttttcctatcacgccatcggtaagggcggttacatcgcgctgctgtcggcgattacggtatttatcgtcgccggccatggcgacaacccaatctccgatggcctgtggcgcaccgtcgatatcctgatcggcatcgtgctggccctggcgttttccttcgccttgccgttgtacgccgtgtattcgtggcgctacaacctggccagcgccctgcgggactgcgcgcagatttatagccggatcaccaatggccaatcggtaaccaacgatgaacacctcaagctgctcaaccgtttgaacggggcgatggtgcaactgcgctcgttgatgccgtcggtgtccaaggaagtgcggatttccatgactgaactggatgcgatccagcggcacctgcgcatgtgcatcagcactttggagattctgggcaatacccggccggacccgcgtgatgagcaggccacggcaaggatgcgggtgatgttgaaggccgagcatcggcagattcgggtgcagttggtggggatggcgcgggcgttgaagtcgggggtgacggagcggttggagcgccctggcagtgtcgcgacgaacgtcacgttgctggaggtcccggtgcacaacgggctggacggctaccgactgttgacgctgcaactgaccgcgaatgtcgacgggatgcgcgagcggcttttgaaaagctcgttacattggaaaatttagtaacaggccagagaagcaggtcctatacaaccccatgaacctgcttcgccttttttacagtgcccttatatttaaggttgcaagcaccaggcccatccaaccgcctgctttcgattacaccagactacttctgggtcgatggagtcccagagtactccggtcaaggcgtcgcattgaggctctgtacatacccagtaccaagagtcataaggtaccggcaatggccaaccataagcgttgcccatgaagcgaatagcatcgccgtaatgaccaatagcgcctggcagggactttctccaattgactgcggtgccccaatccataccgcggcggtcttcacgtacttgccatacgttactgacgctaacggtataggacacttggttattcgccctgtcagtgacaacaatgttagtactgccattacgcatccctgacacaaaccctgtagatgtgaccgtcgccacggacgggttttgggaggtgtaggtataaggaggtcgcccaccggttgcagcccgggtctgcgtattgccggcgtactctgctctctttacccagccggccatgatataagcggttccatttaacgtcatcgtggctgtactgatagacaaggccggataggcggcggtatatgatgtggtagggaatacgacagcacgcgctttatccgtattaccgccaaactccacttcacaggttatcgttatctgcctgttgttgggtaatgactccagccaactgcgtaatacggctttgttcacgaggccattggcagcctctgttgaagtgatcaacgcgccgttagccgtgagtacatgaagcggtgccactcccgaactgctgcaggtgagccacacacgattgcccactgagctcaaagaccacttggcgactgatgcagaggcattgcctgtgaagctgttcaagttcagaacgccaccgggtgcaatattattgatccgtggctgtggcaaactggcagcaggaatggtagtgaccgtcaccgtctgcacattcgacggaatcgggtccgccacacccgtacgtaccaccgaatacttcaagcacaccgtactgttcacactacggtgcaagactttatccgcggtcaggttgaataccaccgtgcctccatccagtccgttctctaccgccgtatgatgagtgccgtcggccaaaatccattcaagcgttatgcggtcttgaccactcataccggtgtagcggacggtcaccgtcgtattgtgttcaatcggcagcgggtccaccgtcacacttggtccggtatcggtggtgccattgataaacggatgaggcaatactcccggcaaggcctggatggtgtaatggcgcacaccgaacagcacggcagtgttcttgtcagggcgttccgccaggctgacccagaacttgatcgtcaaatccacgccgtcctccagcagcttgatcttgtccacaggcgtgggcgggctgatcccattcaacacgccgtcgttcgttacttcattggcggtgtaagtgtcttcaaacacaacgccttcgctttcgtacgtcatccacatcaattgctcggcatggatgaagctccacaccggaatgtaggtccgcgcggttgggctcagttgtgacaagtccagaaccggcccactgatgccttcgatagtcggcgtcggcaacccggccaacggcaatagccgcaggggcacgatcacggactcgtacgggaacgtgccgcgatggaagtgatattgcacattgatggtgttgccaccctcacgaatcccacgggcgatggtgcgagcgtcgacccacacgctggcttcatgggtagttgggttaccagcaacattatctgcgaagctgccgtgatgatcagcggtgatccaatccaccgtaataaggtcaccgtccagcatcggccggaatttcacgattacccgggtgccgcttattgccgccaacgggttgagttcatcgggagcggtggaggcgccctcgatgatcggccggtccaactccacacctttgcccacggtgagcatcagtacttctgaacgcaacaccactttcggcggtccctcacgctccaggctgtaggagatacgcaggctgccgttgaggtttttatcgagaatgtcgcgggtgaccggatagtgcaactccttgccggcggttgcgccgttaatctcgatagtgccactggcggagccgccaaggcctgaaccaatgcacgaccagtgaagcttgtcgccgttttgtgttcccaagtaggtaaaggtgaccagcacatcactaccaggcacgtcagccgggtccacgttgttaccaatagcgccctgcaagcgcggcgccggcatgtctgcaatgcgctcaccgacttgcgccccgagcatcgccgattgacgaatcgccaaggcgccgcctcccaaaatatgggcggcgccatcattggtggtgtaataaatgtggatttcaccccgcccattgaattgctccaactcggctgcggtgacggtgtaggtgccgccttgagaaccggccaactgctctcggctaaaaataatcgcgctacctccacccggcggtacatgggtgatgtacagcgtttccagccagccggggctgtgcggctcgtaggcaggtatggtgacggtgatgtcctcacctgccggaatcaaccccagttcgatagggctgacgctaggcgcgggcattgaaaccttggtgccaaccacggtaatcgtgaggctgccggactcgcgcggtagcggcgcatcggttttccagaaaaatgacaccctaagtgagcccccaaccagctgcgcaatgatgtcgttatcaataggaatataggtaaaccctcggttcaaatcaggcacaggtcccaacaggatagtctcgctggtgccgtcgtctcgggtgcaaagcaaggaaacggtgatctcatacctggggttaggcgctggaaactgccggtctgtcaggacgacgagttcgaaggtcgagccgctctgggtgtcgaagtcgatctgtcgggattcaagctcttggtcatccaccaggaaaatcggtgcgttcaacaggctggggtccagttcggcgttgaggaaatagggtttggaatactgatatttttcgccggagaagttctccaccacatctcgcacccgaaaacgcagggtcaatgtgccccgttgtccgccctgcgcaatgatggacttatccacaaatacgcggatcggccccgctccgcccgcttcatcggaagtgacggtatgcagtacaaaaatgccatcccaggacagttcgatcacatcgttcttgcgaatgtgttcgtacaagtaaatcaggcaatacacgccaaggccgatattttccaagcgcagggtctcgccttcggggaacccttcgacttccatgaccaacccggtatgccatgagctgcccgggtcggtatcggtgccacctggccgggtggttttgatcagaataatctgcttgggggaagtgctttcgttgccgctgcctgcccggcgtactcggccataagtcaccacttcgccctcaggcatacgctcctcggggatcgccaggttctggcgaaccagggtggtatcgctaacgaggtcgtcagctaccgggaaagccaggtcggcatcgctacggccgaagtaactagcgaagtagtcatcaataccctgcgcagaccaattttcaaatgacataagtgcgtaagggcgcacatgccggatgcccaggccatagaccgcaacctcaccgggcacatgcccagcaatagggaccgagggatacgcggaataaggcgggtccaggttttccacgcgctgtgggccagggacaatagactctctctggtggggcagacaggctatggggaaggaagtgtcatcagaggcagcgggcgcgcgatcactgccggaatcaaacgggttatcagacatgaagagctctcctggctgaagggcacgcacagggaattatgcgtggggccagggagatcaaacagtggtaagggaagccgcgtctagctgtgagaattgacagtgacgacaaacggtacattgggtcgagtgaaagtacacctaatacaatgcccgcacattcacacttcttcttacatatttttcacgatttattcacaagccaagccgtagtgtgaagcctcatccgttacaaacgttgcatatcaagcccgccgccccagcgggcttttttttgcctgctttttagctcagaaaaaaggcctacccctgtaggagcgcgcttgctcgcgaaaaacgtcaacgataacgcgggcattctggttaaccgcggtgtcattgcgtttttcgcgagcaagctcgctcctacagggggttggggatgggtttcagcgtgcagcctgttcgcgaatggcgcgctgggtctccagcaccttggccagcgccgtttcagcctcggcactctgctgcggcacgcgaatcgccgccgacaccagcgtgatcagcttggccattacctcggcatccgtggccgggcggcccaggctcatggagttcatcagcaggcgcagttcggtgccggccatgaccccggaaatggctttgagggcaaattgcaggcgcacccccagttcattgcgcggcaaatccggcagggccagggcgaaggcttcgaagaagcgctggaacaccggctggtaatgcaccttgaggtattcctggatgaacggcgaagtatcgctgtagacccggcccaggaagcggatgaacgagcgcccttccccgctggccgggtcgctgcgctccaggcccatggccggggcaaacagtacgcccagcagcgtgtcgcaatccagcgggccgtcggattcggcttcacagcgcgccagcaattccaggcgttgctcgtttaagggttccaggcgttgcatcagcagggttttcatcagggagtccttgtccccgaagtggtagttcaccgccgccagattgacctgggcgcgttcggttatctgccgtagcaacacggcgtcatagccgtacttgatgaaaagagcctctgtcgcatccagcagtcgagtcttggtaacgtttggagcgctgagtttcttcgcgaccatatgggttccacggcggaaatattgttttaaaaaataatttgattttttataccggggcggcccgtcgaaagcaagtagtgacactccgccatatcttgcaaagcctgtataaccgggcttttgagacgaggcatggaatttttgtgcgccccacacacgtgacggcgaaatcgtttcgaagggtaaaaccgctctacctccgtggctggcgaagcgtcaggaaggcagttactattcaaacaatattttaaaaacaagaaataaaaccagtccgtgacgcgtacaggcagcttccgaacttgttacaaagggtttccgggggcaaggcggtaccgtcgagactgcaggcgtagtcatgatgacacagacccccgcgcacccaggtttgatttccctgcaaggcatcggcaagcgctatcagctcgccgggcaagaattgagcattctcaatgatgtgtgcctgtgcatcgccagcggtgacagctgcggcattctcggtgcttccggttccggcaaaagcaccctgctcaacatcctcggcctgctcgacctgcccaactgtggccagtaccactttgccggccatgatattttcaacgccacccccgatgagctggcggcgatccgcaaccagcagatcggcttcgtgttccagagtttcaacctgctgccccgcctcagcgccctggacaacgtcgcgctgcccttgagttatcgcggcgtgtcgcggcatgaatcggtggaacacgcccaacgcatgctcgaacaggtcggcctcggtgaccgcgcccaccatcggcccgccgacctctccggcggtcagcgccagcgcgtggccattgctcgcgccctggtcggcaacccctcggtgattttggccgacgaacccaccggcaacctcgacagcaccaccgcccaagagatcatggacctgctgttgaaccttaaccgtgagcaacaggtgacgctgatcatcgtcacccacgacccccacattgccgagcgcctggagcgcaagattctggtgcgcaacggcgtggtgcatgaggcccggcgcccatgagcctgcgggtcgagcagagcctcagccaactgctgcatgaagcgtttatcagcctgcgtaccttgggcaagcgctcgatcctggcgctcctggggatcgtcatcggcagttcctcggtggtagcgctgatcaatatcggccacaacgcggcagtggatgcggcgatgattttcaaggacatgggtaccgataccctcatcgcccagttcccacccaagggcagcagcaacgtgccgatgcgcacccagctcgacctcgacgcggtacgccaggcagtgccgggcattgcccatctcggcgcgctcagcctgttcagcgggcccatcgtgtttcatgggcgtaccactaatgccaactttgtcggcagcactgcgggtatccagcacgccatgcgcctggcgttgcgtaaggggcgtttcctgtcacccttcgatgccaacgaaacctacggggtaatcggtgaccaactcgcccaggccctcggcgcaccgggcgacccgctgcaactgggcgaccgtgtgcgtatcaacgattacctgtttctggtggtgggcatcctgcacaaccagccccgggccatgctgatgccggtgcaagccaacgaatcgttgtttattcccgccgagggcatgcgccgcatctacgccaacccgcagatcaacaacctgatcatccgcgcagcgccgggacaggacatggaacgtatcgccagggatgccgccgccgcgctgcaaccccagcttaccgaccatgacgtcgacatcacggtgccccagcaaatgatcgatggcatgacccgccaaagccgcaccttcgcctacctgctgctggccctcggcgcaatctccctggtgggcggcggtgtcggggtcatgaacgtgatgctgatgaacgtctcggaacgccgccgtgagatcggcatccgcatggccttgggcgcgcgccagcgagacatccgcaacctgtttttgctcgaagcggtcaccctcaccgccgtgggcgcgctgtgcggcgcggtactgggcatgaccgctgcctggctgtatgcgtggttgtcgggctggacgtttgcgttggcagtggcggccctgcccctgggcgtgggcagcacgttgctggtgggtttgttctttggcatttacccggcagtgtcggcctcacgcttgcagccggtggaggccctgcgcgatgaataagtacctgccactgctcatgctgatcagcctgccgggcgtggccgccgacgtggtgatcaccccccaggcacccagcaccacccgcagcggctacgagcgcagtgtctcgctgaatgcccaagccaccactatgaccctgggcgacgcggtgtacctgggcctgcgtaataacccggcgattcgcagcgcctacctgcaacgggtggcgcagaagttcgacctgcgcgtggccgaagacgtgttcaaccccaagctcacccttaacagctattaccgcagcacccgcggctcccaagacaatgcgcgcaacgccaacgtcgcgcctagcagcagcctgctgggtgaatacggcacacgcttgagcatggcctggacccagcagttgaacaacgccaaccgcgccggccgctaccgcagcgacggcctggacctggcgatcatccaaccgctgatgcgcggcgccggctgggatgccaccaccgcaccgttgcgcctgtcgcgcctggccgagcaggccaaccgcctgaacctcaaggccaccgtggcgcagaccatcagccagatcatcgccacctaccgcgagttgctgcgtgcccaggaacagttggtgatcgtgcaggaagccctcaagcgctccacgaccttgctggaggtgaacaaggcgctgatcagcgccgggcgcatggccgagttcgagatcgtgcagaccgaagccgacatcgccacccagcaattgggcgtggaagaagcccgcaaccaactcgacaccagccgcctggcgttactgcgcctgctggccctggacctgtcgacaccggtgcgtgccaccgaggccctggaagccagccccatggagatagacaagcgccaggccttcaacctcgcgcaaaaccagcaaccggaatacctcgccgccctgctcggcagccagcaggccgaccttaacctggtgatcgccaaggattccgggcgctggcaagtggacctggtcgcaggcgccaaccagatacgcgccgccaccgataacgacgacggccataacaataaccgcacctgggacagttacgccggggtgcaagtgcagatccctattggcgatatcagcacgcgccaggccgaagtgcgtgcgcgggtgaatgtggaggatcaggaaatccgcatcaccgacgctcgccaggaactggagcgcaacgtcaacaatgtggtgcgtgacctcggcacccgctggcgccaatatgaaatctccaagcgcgccgtggagttgtcgcggcgcaagatcgagatcgagcgggaaaaactcagtgccggacgctccaccaacttccaggtgctgagcttcgagaccgacctgcgcaatgccgaaaatgcccagctcaatgcgctgatcgcttatttgaacgcccagacccagctcgatctgaccctgggcatgacgctggaaagttgggaaatcgccctcaatgactattaataaaaaatccctgctggccgttgccttggccctgttgttggccggggcggcagtcagcctgctcagccaacgcggcggcgccgagccagcgaacacggccgagcagtggctggccgtgaagcccgacccgctggtgcaccagatcggcctggtgggcaagatcgagccgcagaccaccgtcaccctgacggcaccgttcgacggcaatgtgctggctaacctggtcgaacaaggccagcgcgtcgaggccggccaggtcctgttgcgcatggacccggcggcgctggaagtgcaactgcgcgacgccctctccgcacaactcaaggcccggcgcaccgtgcaggaaatgcaggactggggcagcagccccaccgtcagccgcgcccgtcgcagtttacgcaccgctgaaatgaccgcgggcaacacccaacgcaaactcaccgagagcgaaaacctgttcaagcgcggcatcatcccgcgcaacgaactggatgacctcaagcagcagactcagcagcagcaactggacctggcggcggcgcgcagtgagctgcaacaagccctggaccaaggccagggcgaataccggcagatcgccgaaatggaactgaccaatgccacggtgaagtacgaagccttgcagaaactgctcgaaggcaaggaggtcaaggcgcccttctccggcatcgtggtaccggcccccggcagcaacaacaccgcgcaagctggcggcaataacagcgcgccggtgcaggccggcagcaaggtcagccagggccaggtgctgttcggcctggccaatatcgaacagttgaaaatcgtcgccaaggtctcagagctggatatcaaccagttgcgtcagggccaggccgtggaagtgatgggcgatggctttgatggcgaacggctgacgggttcggtcagcgtggtcagcggcttggccatcgccagcgacagccagggcagcgcgcagtttccggtgaccttgtcgatccccaagctgacaccgcaacagttgcagcgggtgcgcctgggcatgagtgcgcgcttgactatcgtcacctacaacaatgaccaagcgatcgtgattcccagccaggcgatccaggcggacatgacggtggagtatcgggcggcgatggataaaccggtgcagcgggtgaacgtgaccaccgggcaatcgacgccgcagggggttgaggtgtttgggcttgaggcggggtttgtgaggggcgggggagtcaatcactgaccctcgatcccgagtatgccctaactgtaggagcgagcttgctcgcgaaaaacgtcaacgataacgcgtgcttcctgaannnnnnnnnnnnnnnnnnnnnnnnnnnnnnnnnnnnnnnnggcgccgcgttcattcagcaaacacgcgttatcgttgacgtttttcgcgagcaagaactaggcgtccccctcgctcctacagtaggcgatgaccgcttgactgactggcattagggcaagcccggctcccacagggtcgacatttcagttcagagggaggttgaaacagtgccaaatgggaagtttcagcctaccttgtaggatcctgccacatcttgccgtttggtgatcgtgaaagcggcacgtatgatgcatcccaaactcccgcagattagaagcctatgtccctgatagttctactgcttctgccttttatcggcagctgtctggcggccttgctgccgcataacgcacgtaacaccgaatccctgttggccggccttgtggcactggtcggtactattcaagtcgccctgctctacccccagatcgcccacggtggcgtgatccgcgaagaattcatgtggttgcccagcctggggctgaacttcgtgttgcgcatggatgggtttgcctggctgttctcgatgctggtgctgggcatcggcacgctggtgtcgctgtatgcgcgttattacatgtcaccggacgacccggtgccgcgtttctttgcgtttttcctggcgttcatgggcgccatgcttggcctggtgatctccggcaacctgatccagatcgtgtttttctgggaactgaccagcctgttttcgttcctgctgatcggctattggcaccaccgtgccgatgcgcggcggggtgcgtacatggcgctgatggtcaccggcgcaggtggcctgtgcctgttggcgggagtgatgctgctggggcatatcgtcggcagctatgacctggaccaggtgctggcggcgggcgatcagattcgcgtgcactcgctgtacccggtcatgctggccctggtgctgatcggcgccctgagcaaaagcgcgcagttccccttccacttctggctgccccacgccatggcggcgcccactccggtttcggcttatctgcactcggcaacgatggtgaaggccggcgtgttcttgctggcccgtctgtggccgtcgctgtccggcagcgaagaatggttctggatcgtcggcggtgccggcgccctcactctcctcctcggcgcttactgcgccatgtttcaaaacgatctcaaaggcctgctggcctattccaccatcagccatctcgggctgatcaccctgctgctgggcctcaacagcccactggccgcagttgccgcggtattccacattctcaaccacgccaccttcaaggcttcgctgttcatggccgcgggcatcatcgaccacgaaagcggcacgcgggatatccgcaagctcagcgggctggtgcgcctgatcccgtttaccgcgaccctggcgatggtcgccagcgcgtccatggcgggggtgccgttgctcaatggcttcctgtccaaagagatgttctttgccgaaaccgtgtttatctcgtcgacccaatgggtggaaatcgccctgccgctgatcgcgaccatcgccggtacgttcagcgtggcctatgccttgcgctttaccgtggatgtgttcttcggcccgcccgccaccgacttgccgcacacgccccacgagccgccgcgctggatgcgcgccccggttgagctgttggtgttcacctgcctgctggtggggattttcccggcccagatggtcggctcgatcctcgccgctgccgccctgccggtggtgggcggtacgctaccggaatatagcctggcgatctggcacggctggaacgcaccgatgatcatgagcctggtggcgatgaccggcggcgtggtgctgtacctgctgctgcgcaagcaactcaagcgtggccgcttcgaatacccgccgctgatcggctacttcaacggcaagcgcgggttcgagcgctgcctggtggtgatgatgcgcggcgtgcgccggatcgagaaacgcatcagcaccaagcgcctgcaaacccagttgttcctgttggtgctgctggcggtgatcggcgcaatgatcccgatgatcaacagtggcctcagttggggcgaccgcccgaaaatcccgggctccatcgtcttcgtcaccctgtggttgctggcgattgcctgcgcactgggtgccgcctggcaagccaagtaccaccggctggcggccctgaccatggtcagcgtgtgcggcctgatgacctgcgtcaccttcgtgtggttctcggcgccggacctggccctcacccaattggtggtggaagtggtcactaccgtgttgatcctgcttggcctgcgctggctgccacggcgtatcgaggaagtttggccattgcccaacaccttgcgcaaggcgcgaattcgccgggtgcgtgacttgctgctgtccaccgtagtcggcggcggcatggcgctgttgtcctacgcgatgctgacccgccagacgcccaacgatatctcctcgttctacttaagccgtgccctccccgaaggcggcggcagcaatgtggtgaatgtgatgctggtggatttccgtggcttcgacaccttgggcgaaatcaccgtactcggcgccgtggcgttgactgtttacgccctgctgcgccgcttccgcccgtccaaggaaagcatgcagttgccggcgcaacagcgccaattggcaccggacgtggccaccgacctggtcaacccgcgccaggccagcgacaccgccctgggcttcatgatggtgccggcggtgctggtgcgcctgctgctgccgatcgcgctggtggtgtcgttctacctgttcatgcgtggccacaaccaaccgggtggtggtttcgtcgccgggctggtgatgtcggtggcgtttatcctgcaatacatggtcgccggtacccagtgggtcgaggcgcagatgagcctgcggccgatgcgctggatgggcttcggcctgctgtcggccaccttgaccgggctgggcgcgctgtttgccggctaccccttcctgaccacgcatacctggcattttagcctgccgttactgggcgatatccatatcgccagtgcgctgttctttgacgtcggcgtgtacgccatggtcgtgggctcgaccctgttgatgcttaccgccctcggccaccagtcggtacgcgcgcataaaccgagcaaccagcccaaagtggttgctgcaaccgaaggagccgcctgatggaagaagtcatcgcaatagccattggggtcctggcggcctccggcgtctggttgatcctgcggccacggacgttccaggtggtcatgggtttgtgcctgctgtcctacggggtcaacctgttcatcttcagcatgggcagcctgtttatcggcaaggagccgatcatcaaggacggcgtgccccaagacctgctcaactacaccgacccactgccccaggccctggtgctcacggccatcgtgatcagcttcgccatgaccgcgttgttcctggtggtgctgctggcatcccgcggcctgaccggcactgaccatgtagacggccgggagcccaaggaatgacgtggatgaatcaactgatcgtcgcgccgatcctgctgccgctgctcaccgccgggctgatgctgatgctgggcgagaaacgccgcccgctcaaagcccagatcaatctgtgctccagcatcgtcggcctgggcgtggccatcctgctgttgtactggacgcaacaaggcggccccggctccattggcgtgtacctgccgggcaactggcaggtgccgttcggcatcgtgctggtggtggaccaattgtcggcgatgatgctggtgcttaccggggtgataggcgtcagcgcgctgctgttcgccatggcacgctgggaccgtgcgggcaccagcttccatgccctgttccagatccaactgatggggctgtacggcgccttcctcaccgccgacctgttcaacctgttcgtgttcttcgaggtgctgctggccgcctcctacggcctgatgctgcacggttccggccgcgcgcgggtgtcgtcggggctgcattacatcgcgatcaacctgctggcgtcgtcgctgttcctgatcggcgcggcgatgatctacggcgtcaccggtacgctgaacttcgccgacctggcgttgaaaataccgctggtgccggaggccgatcgcggcctgttgcatgctggtgcagcgatcctggcgacggcgttcctggccaaggccgggatgtggcctctgaacttctggctggcgcccgcctattcctcggccagcgcgccggtggcggcaatgttcgcgatcatgaccaaggtcggcgtgtacaccgtgctgcgcctgtggaccctgctgttctccggccaggccggcgcctcggcgctgtttggcggcgactggctggtgtacggcggcatggcgaccatcatttgcgcggcactggcgatggtggcggcgcagcgcctggagcgcatggccagcctgagcatcctggtgtcggccgggatcctgctgtcggccgtcgggtttgcccagccgagcctgaccgctggggcgctgttctatctggtcagctccaccctggcactgagtgcgctgtttttgctggcggagctgatcgagcgttcgcgttcggccaacgacctgccgctggatgaggagattgatgcgctgcccaaagccatggaatcgctgcatccgcgtcctggcgtgaacctggacgatgagcaaaaagcagtgattggccaggtcatcccctggaccatggctttcctgggcctgagctttatcgcctgcgcgctgctgattatcggcatgccgccgctgtccgggtttatcggcaagctcagcctgttgagtgcgctgatcaatccactgggcctgggcaacgccgtggacgaatcgatccgcccagcggcctggggcctggtggcgctgctgattctctctggcctggcctcgctcatcgctttcgcccgcctcggcatccaacgcttctggaccccggaagaacgcccatcaccgctgctgcgccgctacgagtgtgtgccgatcttcctgctgctggggttgagcatcgcgctgaccttcaaggccgaagcgctgatgcgctacacccaggccaccgccgacagcctgaacaacccggaacactacgtgatggcagtgctcgcgacccggccagtgcccagccctgaagccaaggccgccgccctggaggtgcagccatgaaacgtctgttccctgccccctggttgtcgttggcgttgtgggtgttgtggctggtgctgaacctgtcaatcagccctggcaacctgctgctgggcgcactgctgggctttctcgcgccgctgatgatggcgccattgcgcccgttgccgatccgcatccgtcgccctggggtgatcgtgcgcctgttcttccgggttggcctcgacgtgatcatctccaacctgcacgtggcctggggcgtactcacctgtggctcacgcccaccgcgctcacgctttatcaagatccccctggacctgcgcgacgccaacggcctagccgtgctggcgatgatcaccagcgtgacccccggcaccgtgtggtcggaactggccctggaccgtagcatcctgctgctgcacgtcttcgacctggatgacgaggcctcgtttatccagcaattcaagcacgcctacgaacggcccctgatggagatcttcgaatgagcgccctgctcgccaatgcgatcctgttcagcctgttcctgttctccctggccatggtgctgaccctggtgcgcctgttcaaaggcccctcggcccaggaccgggtactggcgctggactacctgtacatcctggcgatgttgatgatgctgaccctgggtattcgctatgccagcgacacttactttgaagcggcgctattgatcgcgctgttcggcttcgtcggctcgttcgccctggccaaattcctgctgcgtggcgaggtgattgaatgattccgttatgggttgaaattatcgtggcggcgttgctgctgctcagcagcctgtttgccttgattggcgcgattggcttgctgcggatgaaagaatttttccaacgcatgcacccaccggcactggcctcgacgctgggggcgtggagcgtggcgttggcgtcgatcatctacttttcggtgctcaagtccgggccggtgttgcatggctggctgattccgattttgctcgcgatcaccgtgccggtcaccacactgctgctggcgcgaacggccttgttccgcaaacgcatggccggtgatgacgtccccgccgaagtcagcagccgccgctgattcttcaggcgaattcagtaaaaatgtgggagctggcttgcctgcgatagcggtttatccgtcacagcatcattgactgaaattccgctatcgcaggcaagccagctcccacatttggtttagcgccaggcaaaagagcggatacgcgccgcccattgcgccagctcagccggcatcttgtccgattgtgcgaacgcgtggtggtcatttccccggcataacgggacgttttcatctcaaacaaaaacgaataatcctacatcccgctcgcactgaaaaaggcgaaacgtccgatatttcctatttacatttttccgtatgtttgtggcgaacccatcaggaaattcacatccatggctaaccacggttacatgtccattaatggaaaatctcaaggcctgatctcggctggctgctcaacccaagactccatcggcaacaagtgccaggaggggcaccgagacgaaatcatggtgatgtccttcaatcacaatatgctcaacaccggcaatgtcagagcttccacccacggcccggtggttatcacaaaaaacattgtaaatcctcgccattgctggcggtagcgttatccaaccgagaagaactgaactgcgtgatcaacttttatcgcatttcacagctcggccagcaccaaaaatactacaccgtcgatatcaggggctgcatcattgccagcctcaccgtcgatgtaccccactccgtcctgctgaacgatgtagacccacaggaacatctgtcgattcgttatcgggaaatcatctggacacatcatctagcgggcaccagcggctatggctcatgggaaaccggacgatgaaatcaaagaaagaaaatcaagcaccgaacttttatgacttgtgggtcgtcagccaagccgctgcaaaactgaccaatcatgcatgtgcaataagtgcccggcatctacaggatggcgttaatcgttcgatattcaaccgagaggttgcctactacgctcgtagtattgtcagagatgtagagcaaggaaaaaagacagttgcagaggggctgattgagattaaaaaagagcagcgtagtttgctggatcaatcaatagcgattgggagaaatggaatcggagccgttgcgggcgcgctgcaaatagccacgggtgccggaatttgctatgcgtcggtgggcaccctgtgcctcattgcgggtgtgccattgatggcgcatggggctaataatttatatgaaggcggacacaacctagtaacaggaagatccgataccgtcggtccggttcgtacagcatatcaatcagttgcatccgccgtcggtcacggagagcgggaagcaaacatggcctacggcgccgttgatattagcctatctatctacagtactgtacggcatatatacaaacccgatgcttggcgtctatttaggtatttggattcagaccggatacgagcctataaaaccatggcacccacttcgctggcagcggaggccgcaacagatgcaatcacattaaagcaactacatgaagagtctaaaaaatgattattatggcttttctaatactctcgccactgggattattattcgcatactgccttaaagttatcttctcaggcaaaggacttggatataccaaaatctatatcagcttagcagtcaatattttctttatgatgacacatatggaaatcgctcaacttgacaaatacttatacttcggcactcatccagaagtcattgaaaactatccaatcattggctggatcgcactagcgttcttcatacttcatgcactcgcactcccagttaaacgcgacttgaactggtggtggaaacgctaagtgacatcgctattttttgtaaaaaaacgccccgaaccagtcggggcgttttttgttcagcgtgcagctatcaacggtcagtcagccaaccgccacgtcgtcccacccttgccgtcttccaacaccacacccatcgcggtcagttggtcgcggatacggtcggattccgcccagtctttattggtgcgagccgccagacgtgcctggatcagtgcatctacctcagcggcatccacacgcccttcagcgcccgcttgcaggaagtcatcggcctccatctgcaacacgcccagcacgctggccagttctttcaggcgtgctgccaggcccgccgctgcgtcgatatcggtctcgcgcaggcggttgatctcgcgcaccatctcaaacagcacggcgcaggcttccggggtgccgaagtcgtcgttcatcacttcggtgaaacgtgccacgaaggcttcgccgccagcaggcgccaccgcgggcaggcctttcaacgcgtggtagaaacgctccagggcacccttggcgtccttgaggttgtcttcggagtagttgatggcgctgcggtagtggctggacaccagcaggtagcgcaccacttccgggtggtacttttccagcacgtcgcggatggtgaagaagttgttcaaggacttggacatcttctcgccattgatgcggatcatgccgcagtgcatccaggcattggcgtaagtcttgccagtggcagcttcgctctgggcgatttcgttttcgtggtgcgggaactccaggtcgctgccgccgccatgaatgtcgaaggtctcgcccaggcagcaggtggacattaccgagcactcgatgtgccaacccggacgcccggcgccccagggcgactcccagctcggctcgcccggcttggtggctttccacagcacgaagtcgagcgggtcctgcttggcctcgtcgacttcgatgcgcgcgccgatgcgcaggtcttcgatcttcttgcgcgacagcttgccgtagcccatgaacttggcgacgcggtagtacacgtcgccgttgcccggtgcgtaggcgtagcccttgtcgatcaaggtctggatcatcgcgtgcatgcccgggatgtggtccgtggcacgcggttccatgtccggcttgaggatgttgaggcgcgcctcgtcctcgtgcatggcggcgatcatgcgctcggtcagcgcatcaaacgactcgccgttttcgttggcacggttgatgatcttgtcgtcgatgtcggtgatgttgcgcacgtacgtcaagtcatagccactgaaacgcaaccaacgggtcaccaggtcgaaggcaaccatgctgcggccgtggccgatgtggcagtagtcgtacacggtcatgccgcacacgtacatgcgcaccttgttgccatccagcggcttgaagacttctttggtcttgctgagcgtgttgtagatcgttagcacgatgtttcccttaaatcactggccccacgaatctcgcaaggtcacggtacggttgaataccggagcaccaggtttcgagtccttgatatccgcgcagaagtaaccttcgcgctcgaactggaaacggtcttccggctgtgcgtcgccaagcgatggctcggcacgacaaccagtgagtacttgcagggagtcagggttgatgttgtcgaggaaactggcgctgtcttcagccttttcagggttgggcgagcggaacagacgatcgtacaggcgcacttcgcactcgatgctggcagcggccggtacccagtggaccacgcccttgaccttgcggccttcagggttcttgcccagggtgtccggatcgtacgagcagcgcagttcgacgatgttgccgtcggcgtccttgatcgcttcgtccgcacggatcacgtagctgccgcgcaggcgcacttcgccgttcggctccaagcgcttgtagccttttggcggctcttccatgaagtcgtcacggtcgatgtagatttcgcgggcaaacggcaatttgcgcacgcccagctcttctttctgcgggtgacgcggcagttcgaggttctcgacctggccttccgggtagttggtgatcacgactttcaacggacgcagcacgcacatggcgcgcggtgcattggcatccaggtcctgacggatgctgaattcgagcatgccgaaatcgaccacgccgtcggagcggttggtgccgaccatgtcgcagaagttgcggatcgacgccggggtgtagccacggcgacggaagcccgacagtgtggacatgcgcgggtcatcccagccatgtacgtgcttttcatccaccagttgcttgagcttgcgcttgctggtgatggtgtagttcaggttcaggcggctgaactcgtactgacgcgggtgcgccggtaccggcaggctgtccaggaaccactcgtacagcgggcgatggctctcgaactccagggtgcagatggagtgggtgatgccttcgatggcgtccgactggccgtgggtgaagtcgtagttggggtagatgcaccacttgtcaccggtctgatggtggtgggcatggcggatacggtacatgatcggatcgcgcaggttcatgttcggcgaggccatgtcgatcttggcgcgcaacacgcgggcgccgtccgggaattcgccggcgcgcatacggttgaaccagtccaggttctcttccaccgaacggtcgcggaacgggctgttcttgcctggctcggtcagcgtgccccggtactccttggcctgctccggggtcaggtcgtccacataggccttgccggccttgatcagctcgacggcccagtcgaacaactggtcgaaatacttggaggcatagcgcacttcaccggaccattcgaagcccagccacttgatgtcgctttcgatggcgtcgatgtattcctggtcttccttggcagggttggtgtcgtcgaaacgcaggtgcgtgacgccaccgaactcctgggccaggccgaagttcacacagatcgacttggcgtggccgatgtgcagatagccgttgggctcaggtgggaaacgggtgacgatctgcgtgtgcttgcccgaatccaggtccgcctggatgatcgggcgcaggaaattgaccgggacggcaggtccggccttggtattcgaggtagggtcgacagtgggcttgctcataggatccttgaacagacaggttcatggccggttggggccagacaaaacaaagggcttatcatagctgatgctgtcaaggcgctgacagggctcaggtgcatttaacgcaccactggtaaaaaaccacctcgaaattcctgccgggcaggctaaactgcgcgccttggccgtcgtttagccagacaggtaaggtgcccacgcgcccacacccacgaattccctgaaaagagtagtgaacatgactcaagtcaaactgaccaccaaccacggtgacatcgtcatcgagctgaacgccgataaagcgccgatcaccgtcgccaacttcatcgaatacgtcaaagccggccactacgaaaacacggttttccaccgtgtcatcggtaacttcatgatccagggcggcggcttcgagcctggcatgaaagaaaagaaagacaagcgtccaagcatccagaacgaagcggacaacggcctttccaacgacaagtacaccgtcgccatggcccgtaccatggagccgcattcggcctccgcgcagttcttcatcaacgtcgccgacaacgccttcctgaaccacagcggcaaaaacgtgcagggttggggctacgcggtgttcggtaaagtcacccaaggcaccgacgttgtcgacaagatcaaaggcgtatcgaccacctccaaggccggtcaccaggacgttccagccgaagacgtgatcgtcgagaaagccgagatcatcgaagcgtgatattgctgatttcagacttgcatctggaagaggagcgcccggccatcacccgggcgtttctggatctgctccacggccgcgcccgtggcgcccaggcgttatacattctgggggacttcttcgaagcctggattggcgacgatggcatgacccccttccagcgttccatctgcgcggctctgcgtgagctgagcgacagcggcaccccgattttcatcatgcacggcaaccgcgatttcctgatcggcaaggcgttctgcaaagcggcaggcgctaccttgctcaaggacccgacggtcgtgcagttgtatggcgagcctgtgctgttgatgcacggcgacagcctctgcacccgcgacctcggctatatgaagctgcggcgcatcctgcgtaacccgattgtgctgtttatcctgcgccacctgcccttgggcacacgccacaaactggcgcgcaagctgcgcagtgagagcagcgcccaggtgcgcatgaaggccaatgacatcgtcgatgtcacgcctgaagaagtgccacgggtgatgcagcagtttggcgtgcgcaccctggtccacggccatacccaccgccccgccatccataagttgcagatcggcgaccaggcggccaagcgcattgtgctgggggactgggacaagcaaggctgggcattgcaggtggatgagcaaggctttcaactggcggcgtttgacttcgtcaatccgcagttggcgctgcctggcgcataaccctctggcacaacaccgatcaacctgtgggagctggcttgcctgcgatagcatcacctcggtgcatctgatacaccgaggtgtctgcatcgcaggcaagccagctcccacacttgattgcattctaacttttgcggatcagtgccccgatgccgccggccccgcttttgcggtaaacggcggtttggccagccacaccagcaacatcaagcccatgaacatccaccccagcaacgtgaagtaatccacggtggacatcatgtacgcctggctggtgagaatctggtccagttgggtataggccttctgccctgccccacccagcgcctgcaacgcatcgcgggtggtcgagtcgtagacggtcatgttctcgctcatgtaggcatggtgctggtcggcccggcggatccagatccaggtggtcagcgacgccgcgaagctgccgcccaaggtacgcaggaaggtcgccagccccgcgccgtcggcaatctggtgcggcggcaggtcggacatcaggatgctcaaggtcggcatgaagaacagcgccacgccgatgcccatgaacagctgcaccatggcgatgtgggtaaagtccacttcgttggtgaaaccggcgcgcatgaagcagctcaagccaatcgccaggaatgccaggcccgccagcaggcgcaggtcgaacttgtgcgcgtacttgcccacgaatggcgacatcagcaccggcaaaatgccgatcggcgccaccgccaacccggcccaggtggcggtgtagcccatctgggtttgcagccactgcggcaggatcaggttgatgccgaaaaagcccgcataaccaaggatcaacacaatggtgccgatccggaagttacggtgcgcgaacagccgcaggttgaccaccgggtgcttgtcggtcatctcccagatcacgaacaccgccagggcgatcaccgaaatggccgcaccgatgatgatgaagttggactcgaaccagtccaggtcattgcccttgtcgaggatgatctgcaaggcccccaccccgacaatcaggctcagcagcccaacgtagtccatcggctggtagctggtgaccaccgggcgttttttcagctgcgcacgcaccaccatcaccgcaaaaatcccgatgggtacgttgatgaaaaagatccacggccagctgtaactgtcggtgatccagccaccgaggatgggacccgcaatcggcgctaccaccgtgaccatcgccaataacgccaaggccatgccgcgcttggccggtgggtagaccgcaatcaacagcgtctgcgtcatcgggtacaacggcccggcgaccaagccttgcagcacgcgaaagccgatcaactcaggcatagaggtagagataccgcacaggaacgacgccagcacaaacagcagggtcgcccacaaaaacagcttcacctcgccaaagcgccggctcaaccaaccggtgagcggcaaggcgatggcgttgctcaccgcaaacgaagtgatcacccaggtgccctgctccgaactcacccccaggttgccggagatcgtcggcaacgccacgttggcgatggtagtgtcgagcacctgcataaaggtcgccagcgacaggccaatagtggccatcaacaggctgggtggcgtgaacgaggcgttattgctcatcagcgttgcgcagccttgggagcggcgacgctgttgtcatggatcaactggttgatcatggcatcggcctcggccaattggcggtcatacacgttggtggtgaacgaggctttttgcggcgcctgttgcgccagcaccgggccgctctggtcgtgcaggtcgacgttgaccacggtgctcaagcccacgcgcagcgggtgcttggccagctcttcggcgttgatgtggatgcgcaccggtacccgctgcacgatcttgatccagttgccggtagcgttctgcgcgggcagcaaggcgaacgcgctgccggtgccggcgccgaggctgtcgacggtgccgctgtacttcacgtcgctgccgtagatgtccgactcaatatccaccggctggccgatgcgcatatcgcgcagttgggtttccttgaagttggcgtcgatccacagctggtccagcgggatcaccgccatcagcgcggtgccaggctgcacgcgttggcccagttgcacagtgcgcttggccacgtagccggtaaccggcgcgatcaaggtgctgcgcgcattggtcaggtacgcctgacgcagttgcgcagcggcggcttgcacgtcggggtgggacgaaatcaccgtgtcatccaccagcgcattggtggttttcagttgttgctcaaggttggtcaaggcgttcttggcggcggtcaggctgtcgcgggcgtgggacagttcttcctgggaaatcgctccgccctgggccagggttttacggcggttgtagttgtcctgggcggtttgcacatcggctttctgcgcattgacctgggctttcatgccatcgacgttgctgtacaggccgcgtacctggcgcacggtgcgggccaggttggcctgggcactctgcaggccgacggcggcgtcgttggggtcgaagttgatcagcacctggccttcgtggaccaggtcgccatcgtcggcgccaatgctgaccacggtgccggtgaccagcggggtgatttccaccacgttgccgttcacataggcgtcatcggtgctttcattgaagcgcccgtagaactcataccaggcccacacgcccaccacactcaggatgacgatcagcgccaggccgatcagcatcactttgcgtttgcgggggttggtgtcgttgggttgttcggttgcgttgttgctgtcggcagtggccatgacaaatacctcaaattattccgtgcgtgttgcgggggtggtcgcggccacgctgttggcgtggtacccgccacccagggcctgcatcaattgaatcgacaggtcgatctgcgccgcattcagggtggccagctgacgctgggcctgcagcaattgctgctcgatgctgagcacatccaggtagttaccgatgcctgagctgtagcgctgcaccccggtgtcgtaggactgctgcgcgatgtcggccgcgtgttgctgggcctggatctgccgcccggtgtcgcgcagttgggacaggctgttgccgatatcacccaaggcttgcaccagggttttgttgtactgggccacggccaggtcgtagtcggcgtcgcgggcatcgagatcagcacgcaggcggccgccgtcaaagatcggcagcgaaatcgtcggcgcaatgttgaagaagcggctggccgaaccgaacatcgcatcgcccagcaacgactcggcacctgcgctcgcgctcaggttgaggttggggtagaagcgggtcttgctggcgtcgatgttcttgctcgcggcctctacgcgccagcgtgcggcaaccaggtccgggcgacggccgagcaactcggcaggcagcaccgcgggcacggccacggcgctgggtttgagcaccgctgggcgggccaactcgtcgccacggtccgggcctttgccgagcaatacggcgagagcgatcttggcgctttgcagttgtttttccgcgtcaatcagttgcgactgggagctggcttcgaggctctcggtctgctggaactggtattcgctgtcgataccggaactcaggcggcgtttgctcaggtcgagcatctggcgggtgcgcttgaggtcatcgacggccaggtcacgcacgatatgggcctggcccaggtcgctgtaggccttggccacgttggcggccagggtcaggcgcgcagcctgctggtcgacttcggcagcgcgggcctcgcccaacgcggcttcccacgcggcgcgctggccgccccagaggtcgaagttgtagttgaagctggcgccgatgttacgcacggtcgaataggcatcgccctgcccgcgagggtcctggtccttggccaggcgcgaacggctcacgccagcgctggcatccagggtcggcatgcgcgccgcgttggcggcataggccgccgcttcggcctgatgggcacgagcgtcggcgacttgcatgtcggggctgttctgcagggcttcctggatcaggccgtcaagctgcgggtcgcccaggcttttccaccagtcagcggccggccaggccgcgctcgacagcgtcacgccgctgagggatttgctggtgtgcagggtattggcgtcgaggcgctggccctgggtgtcgaggccgctgtaattggcacaaccggccaacgtcatcgccgccagcaccaggctgaatgcgcgtgtattcatgatcgacctacccgctggatcgtgatggggtcacccgcagcgatcagcatttttttcaggatccgctccagggtttccagctcgcccggctcaagcacgccggccaactggttgagcgccttggcgccgatgtgcgggagcatgtccgccaggcgttggccctcagtggtcagcaccagctgcacctggcgacgatccagctcggaacgcttgcggctaagcaggtctttttgctccagccggtcgagcatgcgcgtcatcgaaccgctgtccagggacaggttgcggcacagctccgccggggtatcgacgccgaactgggccatgatgatcaacaccttgaactgcgcggcggtaatgccgtggggttccatatgggtgtcgatgatgcggtccttgagaatcgcagcgcggcccagcaacaggccgaggtggcagttgtggaagttgtcaggggtgaagtgaggcatcgaaagtcaccttattactgcctaggcagtgaatgtgtgacgagatgttactgcttaggcagcgaatgtcaaatggaataattaggttgcttggtagttgagtaacttagagccttgggcagcaatcaactcagggagagtccagttaaggctttttgtaggagcgagcttgctcgcgaaaaactcacgggcgccgcgtgcattcaggatgcacgcgttatcgttgacgtttttcgcgagccagctcgctcctacattttttgaccgggcaaggcttagaaatcgcgcttgtaaaagatatccagggagctggccacacccgtcgccacttccaggtacaccttcttgctcagcaggtagcgcaaggcaatggtgttggccggttcgaacacccctaccccataacgcaggctgagcttctcgttgatcttgccgctggccaccaccgcagtactgttgccggtgccttgggtgtccagatcaaaatcctgaatccccagcttattggcgatatccgtggtcaccccggcgctgcccatcaagcccaggcccagggcggcttcggcgagcatgttgttgtcttcgccggtgttggtgcgcgaacgacccagcaccaggtatgacaacgcatcttcctgggccatggccggctcggagaagatctgcgtggtgggctgttcggcgctgccgctcaggcgtataccggcggtcacggtgcgcgacgattcgatcaccacgcgcacggcttcgatgtccaggaagggctggtccagcggcccggcaaacagcagccgtgcacggcgcacgttgaggcgttggccgtaggcgcggtagcggccgtcgtttagccacagctcgccgcgggtgtccatgttgtcgccgatatgcacatggccctggaccttggcggtgaggccgaagccggagaagttgagctggtcttcgcctacctccacgtcgatatccatggccatggccatcggcgctttgccctcttcggtctggctgccaatgatcacggtgtcgtcggacaccttgaccgtcgaaggcggcagttcgcgcacggtgatgtcgccacgggggatgtggactttgccggcaatcgccagtttgtcgtccttgaggctgatcttcaggtcgggcgccacttccagcttggcgtagggttccacggtgactggcagttgcgagcctttgaggctgaggtcgaccaccagggcacggccccagtcgatctgccccgtgaggctgccctgcccggccttgccgctgtgccagccgccgttgagctgcacgctttcaccggcgatctgcgcctgcaggttcaggccctcgaggctgatgggcaactccggcccggagacttcaccgtccaccaggttcaggttgccgttgatctgcggcgcgagcaacccgccggagatacggccgctgccgttgagcttgccggtgagtttttcaaccattggcacaaagggccgcgccacggcgaggtccaggccagtaaggctgaagttgccggtgattggcttgttgttcggcagcgggttgatctgcgcctgcaacagcaactcgccgagcttgccgccatgaaagttgagctgagtgtcgatgcgcttgggattgagggtggtttccagcttcagggtgttgtaggggaaatccaaccattggcccttgtcacgcacgcgcaaggtgccaccgctggcatctaccgctaccacaccctttgggccgctttcaggcaggtcaagctgcacgtcagcattgagcttgccctgccaggcgaagtctttgggcaaaaatgccgcaaggctgtcgaggggaaattgcttgaggtggtaacgcaacttcggctcgggcatcaggcgctggtcttccccacacaggctggcgccgccggagacccagcagtgcgcgccgaaggtcagcttgccatcggccaggcgttcgatcttcgccggggcttgcagccgccagtcctggccaccggcttgcacgtcgccactggccaggcgcccgcgccagttgtctttgtcgaggttgccatccagggccagggctagtttgaccagcgggccggtcagggccagttggaccttctggttcttgatgtcgccctgggcgctggcggtaaggttgccgacttgcgtctcgccgctttgaatgccgttggccttgaggtcgagcttggcgcgctgggcgctatcgaggttggcgtccaggttgaggctttgcaggcggttgtcggcaaaggccagttgctggcccttgaggtcgagcttgccttgaggcgctttcaaggtgccggccacctcgacacgcccgttgacttgcccgcgcagttgcggccagagctgggccaggcgtgccagcttgatgtcgatctgcccggccaggcgctgttgcaggctgccgctgccgttgatgcggttgtcgcccaggcggatgtccaggttggcgagggtccattgttcgccggcgccttcggccttggccgcgagcacggcggtttggccacgcaggcgacccttgaggtcgaggtcggcgttgagcttgagctgttcattcttgaactcgcctttgctgcgcagcggtccggccagggtgccgggcagctccgcgacccaataggccgggttcagcgccgacagatccagggcggtgtcccaggcaatgccgtcggcaaattgcaggttcaggtggccttcggccttgccttggccggcactcagtttcagctcaggcaggaagacctgcttgaggtcgccactgaagggggtgaccacattgaacttgcccgccgggccgtcgaggtcagccttgatattgcccaggtagttgccgtctttataggagatttcaccgttgaaggtgcgcaaggccacttgcggttcgtcgatgaccggatagaggcggtgccagggaaaatccagccagtcgatcttggcgtccgcgctgaagccttgctgccagtccaggttggcactgagcttgaggctttgcttgtcgccggccgtcaggtccaggccggcaatctgcgcgcccttggcgtcaaccttgcccttgagcagtaaatccaccgggcctttttcggccggtagcacggccttgcccagcaactggtagccattgctcaggtcacctttggcgctcaggtccaattggttgagttgcagggtatcgggcaggtctgcgctgggtttgaacgactcggaggtgatgtgcacctgcgccggcaggttttccgccaggggttgcagctcgccagtgagcttggccggcaggtagccgctgctgtcggcgtcgagcttgagggttttgagcaggtcgccgtcgagcttgagggcgatggtccagggtgctccgcccggcgcatagggcaagctcaggttaccggtggcattcagcggccaatcgccgttgggttgcagcaggccggcgaggtccagcaccaggtcatcgcgctgtagatgcaccgcgtcgatctgcaggccggcggtagtccagtgcgccgccagttgcaggcccttgagttcttcattgccgttgaacagcaggctgccgatgcgcacatcgcccaactgcagggcaaccggcagcttcaggtcgggcagttgaatcggccggctgtcgctctcttcggcactgggggcgaattccaggctgacctgttccacatccagtcggttgatgcacagggtcatgcgcagcaggcagccgggcgaccattcaaacgtaggggcattcaactcgacgcggctgccatcctgctgccacagcagatggtcggcgctccactgcccgcccaaacggccctggaaattttccacgctcaaacctggcacctggcccagggcccagcgactgcccgcctgggtgccgagcaccgaccacagcgccaacaccagcaaggcgaggatggcgaccagcgccagccccgctattttcaaaccacgcatcacagctcaggccccatggaaaagtgcaagcgaacgccgcccggatcttcgagggcatgggccaggtcgaggcgaatcggccccactggcgacacccagcgcacgccgacgcccacgccggttttcaggctgggcaagtcgaggttgttgaaggagttgccctggtcgacaaaggtcgcgatacgccatttatcggtgatggaatattgatactcggcgctcaaggccaccatgtagcggccaccgatgcggtcgccgcgatcgttctcgggcgacagcgtctggtactcgtagccgcgcacgctctggtcgccaccggcaaagaagcgcaaggaaggcggcacggatttgtagccattggtggcactgccgccaaattgcgcacggcccaggaagcggtggttgtcccacaaggtggtcaggcccttgatagtcgccgtgccgtaaagcaggttggtgtcggaccccgcgccctccttggcgaccttggtgtcgaacatcaggcggtagccgtggtgcgggtcgatgcggttgtcgctgcgcaggtaggaataactcacgcccggcatcagcaggttactcagacccgaatcattgcccagacgatattcttcgcgctggtacttgagggagatcacccgggtccagccactgggcaatttgctgtgccattcggggccgatggtgagcagcttgctcagggtgtcggtgttggcgatttcttcattctggtagccgccggcaaagcgcagtttgtcggtgagcggcgggtcgagggggatgtcgtaccacagcccgacgttctgccgtggcgccgacagttcggcttcccagccataactgtggccctgggggttgacccaatggcgcgtccagttggctttgccccgtgggccgacgtcggtggagtaacccaggcccaggcccatggtgcgcggcttgcgggtgtccagttgcaccgccaccgggatcacgtcatcggtggcggcggtggggctggcgtcgacgcgcacgccttcaaagaagccgctggcttgcaggttctgattgagttcggcgaccagctcggagtcataaggcgtgccgggcttgaacggcaccatgcgctgcaacagttcttcatcaaagggcgtgtcgccggtgaagctgaccttgcccatgctgtagcgtgggccgctgtcgtaaatgagttcgatgtcggccacgcccgcttgagggtctacggcaagtttctggctggtgaagcgcccactgaaaaacccgtagcgcgaggcctggttctggatcaggcgcttggcgtcttcgtaatggccgtggttgagcacggcgccggatttgaggtcgtcgctggcgggcacgcgaaaggccttgaggctcgcagccgggccatcgactcgcagggtcacgttgcgcaaatgcaccggttcgccggggtcgatggtgagggtcaggcgcgggttcttgccgcccttcacatcgctggcgatctgtggctgatagtagcccagggcctgcgcagctttacgcgcctgctcctcggcgccacggctgaaccgcagcaaggcttcttcatcacgatcgcctaccccgccgatgtagccttcgatgttggctttcagcgcgtcgtttgagggtttgatccgcacgtccaattcgctttgcgccaaggcgccgcagcttgtgaacagcagaatcaagccgctggtaaatcttcctggaaacttcataggcgcggatgctacacgagcgagggaggaactttgaaccaggattagtctgaataattctgttctaagccgttgcaggatgtaacgcctggggattgggatggaaaaacacatgctcgcgcaccggccctacggcgacttcgccgatttcctcatagccctggcgcttgtagaaatccaggtaacgggagttgccggtgtcgagcaccacgccggatgaatgcggatcgtcggcacaccaattgtgtaccgcttccagcaactgctcaccatggtgcttgccctggaactgcgggtgaatgcccagcagcggcaacacatgcacagactcggtgggcaggcacgccatgacggcatgatggtattccaggtaacgccgcgtaccgcgcacgccggtgctcagccacatacggatttgccaggcccagctttcggtgatgcccaggcgccgctggggcggtgcaatcaaggcgatgccgatcagccggtcgttgacgaacaggccgatggccgggagtttctgaaagaagtgctgcttgaccagttcgcgcacagtggcacgtacccgctgctcatagcccgcccgctcggcttcgaagatgtaggcgaaggtcggctcatggcgatacgcctggtacagcagggatcgcgcttcgcgggagtaaccgctattgagcaggcggatttcggcagtggccgtcgaagtgtctggcataacaatcaatctccctgggcgccactcaaacatggcgttcttatgggtacgaacctgcacagctccagtcgttcccacattagcagcgcattcaccctaccgccacgctggcccccgtccgacttgtcggctagcatcgcccttttgccagactggactgccgaccatgaaaatcgtctccttcaatatcaacgggctgcgtgctcgccctcatcagttggcggcgctgattgaaaagcatcaaccggacgtgatcggtttgcaggaaaccaaggttcacgatgatcagttcccgttggccgaggtgcaggccctgggttatcacgtgtactaccacgggcagaaaggccactacggcgtagccctgctctcgcgcaaagaagcgttgagcgtgcacaaaggctttgccagcgatgaagaagacgcccaacgccggtttatctggggcaccttcgccgacgaaaacggccagccggtaaccatcatgaacggctacttcccgcagggcgaaagccgcgaccacccgaccaagttcccggccaagcagcgcttctatgcagacttgcagcacctgctggaaacccagttcagcaacgaccaggcgctggtggtgatgggcgacgtgaacatttccccagaggactgcgatatcggcatcggcgcagacaacgccaagcgctggctgaaaaccggcaagtgcagcttcctgccggaagaacgcgagtggatggcacgcttgaagaactggggcctggtggacagcttccgccacctcaacccggatgtgaccgaccgcttcagctggttcgattaccgcagccgtgggtttgaggacgagcccaagcgcgggctgcgcattgatgtgatcatggcatccaccgggttggtgccacgggtcaaggatgcgggggtggattacgacctgcgcgggctggaaaaaccgtcggaccatgcgccgatctggttggaactgagctgacctcaaaaatagattgtaggagcgagcttgctcgcgaagaacttgaaagcgccgcgttaaaacagattcgctgcgttatcgttgacgctcttcgcgagcaagctcgctcctacagggcatcagggtttgccagcgcccgtgttggtcatatggctgcaatccaactgacttaatcttgcggtactccctttggcttgagacggtgccggcatgatgctgcgcgttctgttcctgtgttttgcaatcgccctccccgccgtggcggcccctctgcccattcccgaccaaggcccggccctgcgcatccagggctccaacaccatcggcgcggcactcggcccggcgctggtcaagggtttgatggagcatcagggcttgcaggacgtacacgctgaagcgggtgcgggggccaatgaacagcgcgtggtcggcaagacacgccaaggccagacggtcaccatcgaggtcgcggcccacggttccagcaccggctttacggcgctgaaaaacaaccgcgccgacctcgctgcagcgtcccgcccgatcaaagacaacgagctggtggacctcgcccccttaggtgatttgaaaagcccaggcgccgagcatgtgatcgccatcgatggcttggcaattatcgtcaacccgcgtaacccgctcagtaccctgaacaccgaacaattggcgcagatcttcaacggcgaagtcagcacctgggaggcactgggcggtacaggcggggccattcatttatatgcccgggatgatcaatccggcaccttcgacaccttccgggaactggtgctgagccgccgcggccaaccgctcgcgccgtcggccaagcgctttgaatccagcgaacagctgtccgatgcggtgagccaagacccccagggcatcggttttatcggcctgccctctgtgcgccaggccaaggcggtggcgattgtcgacggcgactcgcaaccgatgctgccgctgaccagcctgatcgccaccgaggattacccgctgtcacgccggctgttcttctacttgccaccctcctcccccaacccgtgggccaaggcgttggtggactttacccaaggcagccagggccaggcgattgtggccgccaatggctttatcgcccagcaggtgcaagcgattggcgtggcgccgcgcccgtcgatgcccgacgactaccaggccatcgcccgcgacgctcagcgcctgacggtgaattttcgcttcgacgagggcagcgccagcctcgacaacaaggcgcgccaggatgtgcagcgggtggtggcctatatcagaagccacggcaagctggataaacaggtgacgctggtggggtttggcgacaccaagaatgacccacaacgtgcagctttgttgtcgaaattgcgggcgatggcagtgcgccgggagctggtcaagagcggcgtggtgctcaaggatattcgcgggtttggcgcgcagatgccggtggcggccaatacggcggatgagggccggatcaagaatcggcgggtggaggtgtgggtatactgaggatcgttgaagatcgttcccacgcagagcgtgggaacgatcatcatcatcaacgatcatcacaggcgacgcggtgttactgcccgccgcgcatcaattcccgcggcacatacttgccgatctcaaacttgccaatcgccgcgcggtgcacttcgtccgggccgtcggccaggcgcagggtgcgttgcatggcgtacatataggccagcgggaagtcgttggagaccccggcgccgccgtgcatctggattgcgcggtcgataaccttcaaggccacattcggcgccaccaccttgatctgggcaatttcgcttttcgccactttgttgcccacggtgtccatcatgtacgccgctttcaaggtcagcaggcgggccatgtcaatttccatgcgcgagtcggcgatcttgtcgatattgccccccaaccgcgccaagggcttgccgaaggcggtgcggctgaccgagcgtttgcacatcaattccaatgctcgctcggccatgccgatcgaacgcatgcagtggtggatacggcctgggccaaggcggccctgggcgatctcgaagccacggccttcgcccagcaatacgttttcatagggtacgcgcacattgtcgaacagcacttcggcatggccgtgaggcgcatcgtcgtaaccgaataccggcagcggtcgcaggattttcacgcctggggtatcgaccggcaccaggatcatcgagtgctgctgatggcgcggtgcatcggggttgctcaggcccatgaagatcaggatcttgcaacgcgggtcgcaggcgccagaagtccaccatttcttgccgttgatcacccactcgtcgccctggcgttcggcgcgggcggccatgttggtggcgtccgaggacgccacatccggttcggtcatggcaaaggccgagcggatctcgccgcgcagcaggggttcgagccagcgctgcttctgctcttcgttggcgtagcgcaccaacacttccatattgccggtgtcgggggcggagcagttgaacggctccgggcccagcaacgagcggcccatgatttctgccaagggtgcgtattcaaggttgctcaggccggcgcccagttcggattccggcaggaacaggttccacaagccctcggccttcgccttggccttgagttcttccatgattgccgtgggctgccagcgatcaccttcgctgacttggcgttcgaacaccggttcggccgggtagacataagtgtccatgaacgcagtgacgcgttcacgcagttcctgaaccttgggcgaataggcgaaatccatgagcagctcccttctctgagaggttgtttaggtcatgcattcgatgctagaacagcgctgataatttacctagcctattctcggcgtgtattaacattcatcaccgatatatgatcggcgtatgagcacctaacaataagagcgcaacgaaatgaatctgagcaaggtcgatctcaacctcttcatcgtcttcgatgcgatctacaccgaagccaacctgacccgcgccgggcagattgtcggtatcacccagccagcggtgtccaacgccctggcgcggttgcgcgagaccttcaacgacccgctgttcgtgcgtactgcccaaggcatggtgcccacgccgatggcgcagaacatcatcggcccggtacgcaatgcgttgtcgttgctgcgcgtgtcggtgcaggaaagccgcatcttcaacccgcagcaggcggccaagacctaccgcatcagcatgaccgatctgaccgaagccgtgatcctgccgctgctgttccagcgcctgcgtcgcctggcgccgacggtggtgatcgagagcttcctgtccaaacgccgcgaaaccaccaaggaactcgcggccgggcgcctggattttgccgtggatgcgccgctcaacactgacccgcaggtgcgtcacgtcaagctgatggaagaccgctacgtgtgtgccatgcgcaagggccatccgatggcgggcaaggacaaattcacgctggatgattacctgtcgctgacccatatccatatctccagccgtcgcaacggcttgggttatgtggacctggccctgggcaagatgggcatccagcgcaagattgccctgcgttcccagcattacctgatggcctcccaggtgctgcaacagaccgacatggtgatgaccgtgcccgagcgtttcgcccgccgtcatgaactgcactggttcaatctgccggtcaacaacgtgccgccggtggaaacccatttgtactggcacgaaagcaccgaccaggacccggcaaaccgctggatgcgtgaacagatgatcgagttgtgccagcaggtgacggcccaggaaaagaaagcccagcagccttgacgtttacgtcaacctgcaattagcttagcgccaagacttccttgagcaccgccatgagcaccacctacagcatctccgacctcgcccgcgagctcgacatcaccacccgcgccattcgtttctatgaagaacaaggcctgctggccccggagcgtcggggccaggagcgcatctactcggcgcgcgacaaggtcagcctcaagctgatcctgcgtggcaagcgcatcggcttctccctggccgaatgccgcgagctgatcgaactctacgaccccaccggcggcaaccagatccaactcaacagcatgctggccaagatcgccgaacgccgtgagcagttggaacagcaactgctggatatcgaacagatgaagctggaactggacaccgctgaagagcgttgcacccaggccctggcgcagaccatcagccaagccggccattgaccagaaggtaactgccatgtccctcccctcccacgtacgcctggttgaagtcggcccgcgcgacggtttgcagaacgaagcccagcccatcagcgtggcggataaggtccaactggtagacgccctgagcgccgccggtttgagctacatcgaagtcggcagttttgtctcacccaagtgggtgccgcaaatggccggctccgccgaggtctttgcgcagatccagcgcaagcccggtgtgacctatggcgccctggcaccgaacatgcgcggcttcgaggatgcgctggcagccggggtcaaggaagtcgcggtgtttgcggcggcctccgaggcgttttcccagcgcaatatcaattgctccatcagcgaaagcctggagcgcttcgcgccgatcatggcctcggccaagcagcacggcgtgagcgtgcgcggttatgtgtcctgtgtgctgggttgcccctatgaaggcgtgatcgccccggagcaagtggcggcggtcgctcgcgagctgtatgccatgggctgttatgaagtctccctgggcgacaccatcggcaccggcaccgcgggcgctacccggcgcctgttcgaagtggtcggcgcacaggtgccaagggacaagctggccgggcatttccacgacacctacggccaggccatcgccaacatctatgccagcctgctggagggcatcacggtgttcgacagctccatcgccggcctgggcggctgcccttacgccaaaggcgccagcggtaacgtcgccaccgaggacgtgctgtacctgctcaacggcctgggtatccacacgggcatcgacctggaacgcttgattggcgccggccagcagatcagccaggtgctgggacggcctacgggttcccgcgtggcgaaggtgcgtaacgccgggtgagtagcacagctgtgacaatgtgttaccgcacgccggcgtaacgggtaacgcgggaacaaaatccgccgcacacacggcaagataaagcgggccaaaaaaccaaaccattgattttaaaggcttttaaaaagttggcacgcgttctgctatctctattgcataacaagaataaaaagcgccaaacctaataaaaataagacgaaacgactctgacataacaaaaacaacacggcagagacgcagctaacagatttttttggagaagatgtgcttcccagggtacggcatgccgcaacccgcaaccggatagagaaaaataaaactacctcaggtagctacccactggttggatcgtttacgaagaagcaggtcagcgttcaaaaaaatacgtttgctcttgaccccggatgggggtcgccaaaaaaagcggtacgggccacggctaccaaaaacaacaacaggccgcccctcaataataagaaaagagcacgcaacgacaaattaaaggggaccttcgggtcccctttgtgctttctgggtttcactatttgggtggcacagcaggttcgcggggtatcaggtagatgtgggccggcagtcaggccgccatcgcaggcaagccagctaccagggtttgacgttgtcagcgcgcttgcagctcctggatggaaatctcgcgcatccgaaatttctgaatcttgcccgtcaccgtcatcggaaactcatccacgatcttgaaatacctgggcgtcttgaaatgggcgatgcggtccttgcaccagctcaacaactccaactcattggccacctgaccgggatggaacttgatccaggcaacaatctcttcgccataacgctcatccgggatgcccacgatctgcacgtccgccaccgccggatgagtaaagaaaaactcttccagctcccgcgggtaaacgttctcccccccacgaatgatcatgtccttgttacgcccggcaatgcacacgtaaccctcctcatccatggtcgccaggtcaccggtatgcatccagccggcatcgtcgatggcctcacgggtgccttcagggttgttccagtaacccagcatcacgctgtagccccgggtgcacagttcaccgatcacgccacgggccacggtgttaccggcctcgtcgacaatcttggtttccagttgcggttgggtgcggcccaccgtggtgacacgccgttcgatatcgtcatctgcgccggtctgcagcgacaccgggctggtttcagtcatgccataggcaatctgcacctctgccatgtgcagctcatgaatgacccgacgcatcacctcgatcgggcatgtcgccccggccatgatcccggtgcgcaggctggacacctcgaactcggcccggcgtgggtgatcgagcagcgcaataaacatggtcggcacgccatataagccggtggcttgttcttcggcgacggcgctcagcgtcagcaacgggtcgaagccgtcattggggtagatcatggtggtgccgtgagtgatacaaccgaggttgcccatgaccatgccgaagcagtggtacagcggcactgggatcaccaggcggtcccctgccgtcaggcccaggctttcaccgaccatgtaaccgttattgaggatgttgtggtgactgagggtggcgcccttggggaagccggtggtgccggaggtgtactggatattcacaggttgatcgaaatgcaggctggcctggcggctgtgcagttgctcgggcgacacgcctgcgccaagggccgccaactgcgaccagggcatgaattccggcggcgggctggggtccaggctgagaaggccgcgaagctcgggcttcagcgcctggagcatggcgtggtaatcggagcttttgaacgagccggcgcataccagccattggcagccggattgtttgagcacgtagtccaattcgctgctgcgataggccgggttgatattgaccaggatcaccccgagcttggcgcttgccacctggcagatcagccactcggcacagttaggcgcccagatacccaggcggtcgccggtttgcatacccagggcgaggaatgcgcgggcgtgcagctcaaccgtctcggccagttgccgccaggtgtagcgccgctgctggtggcgcaccaccaaggcttcgccatctgggtattgcgcgacagtgtgatcgaatgcctggccaatggtcatggccagcaaagtcttgtcctgggagccacgactgtagctcgggtgcggttgatccataacgacccctgttatcttttttgtaggtttacgtatacgtaaactacgattgacagcgtcgtaacgcaagcttacgttaacgtaaaggtgagcgccctcctcccgcgccccgcccacacaacaacaaagctcacattaaggtgcctgtccatgagttacccgtccctgaacttcgccctcggcgagaccatcgacatgctgcgcgaccaggtgcagtccttcgtggccaaggagatcgcaccgcgcgcggcccagatcgacatcgacaacctgttccccgctgacctgtggcgcaagttcggggacatgggcctgctgggcatcaccgtgcccgaggagtacggcggtgctggcctgggatacctggcccatgtggtgagcatggaagaaatcagccgcggctcggcttcggtggcgttgtcctacggcgcgcactccaacctgtgcgtcaaccagatcaaccgcaacggcaaccacgcacaaaaactcaagtacctgcccaagctgatcagcggcgaacacatcggcgccctggccatgagcgagccgaatgccggttctgacgtggtgtcgatgaaactgcgcgccgacaagcgcggcgatcattacgtactcaatggcagcaagacctggatcaccaacggcccggacgccaacacctatgtgatctacgccaagaccgacctggaaaaaggcccccacggcatcaccgccttcatcgtcgagcgcgactggaaaggcttcagccgcagcaacaaattcgacaagctgggcatgcgcggctccaacacctgcgagctgttttttgacgatgtcgaggtacccgaagacaacatcctcggcgtgctcaatggcggcgtgaaagtgttgatgagcggcctggactacgaacgcgtggtgctctccggtgggcctaccgggatcatgcaggcgtgcatggacctgatcgtgccctacatccacgaccgcaagcagttcggccagagcatcggcgagttccagctgatccagggcaaggtcgccgatatgtacacccaactcaacgccagccgtgcctacctctacgcggtggcccaggcatgcgagcgcggcgagaccacgcgcaaggacgccgcgggcgtgattctttacagcgccgagcgcgccacgcaaatggccctggatgcgatccagatcctgggcggcaatggctatatcaatgaattccccgccgggcgcctgctgcgtgacgccaagctctacgaaattggtgcgggcaccagtgagattcggcggatgttgatcggtcgcgaactgttcaacgaaacccgctgaaggagcgccccatggctaccctgcatacccagctcaacccgcgctcggcggaattcgccgccaaccgcgcggcgatgcttgaacaggtcgacgccctgcacagcctgcttgcccacgtccaccaaggtggcggcgccaaggcccaggaacgccacacctcacgcggcaagctgttgccccgcgagcgcatcaaccgtctgctcgacccgggctcgccgtttctggagctgagccaactggccgctcaccaggtgtatggcgaagacgtcccggcagccggagtgattgccggcatcggccgagtggaaggcgtcgaatgcatgatcgtggccaacgatgccacggtcaaaggcggctcctattacccgctgaccgttaaaaaacacctgcgcgcccagaccatcgccgagcagaaccgcctgccgtgtatctacctggtggactccggtggtgccaacctgccgcgccaggacgaggtattccccgaccgcgagcacttcgggcggatcttcttcaaccaggccaacatgagcgcccagggcattccccagattgccgtggtgatgggctcgtgcaccgccggcggcgcctacgtgccggccatggccgacgaagcgatcatggtgcgccagcaagccaccatcttcctcgccggcccgccgctggtgaaagccgccaccggtgaagtggtgagcgccgaagacctgggcggtgccgatgtgcattgcaagatttccggcgtggccgaccactatgccgacagcgatgaacacgccctggccctggcgcggcgcagcgtggccaacctcaattggcgcaagcaaggtgagctgctgcaacgcccgccggtggcgccgctgtacagcagcgaagagttgtacggcgtgatccctgcggatgccaagcaaccctttgatgtgcgcgaagtcatcgcacggctggtggacggctcggtgttcgatgagttcaaggccctgttcggcacgaccctggtgtgcggctttgcgcacttgcatggctacccgattgcgatcctggccaacaacggcatcctgttcgccgaggccgcgcaaaaaggcgcgcactttatcgaactggcctgtcagcgcggaattcccctgctgttcctgcaaaacatcactggtttcatggtcggccagaagtacgaggccggtggcattgccaagcatggcgccaagctggtcaccgccgtagcgtgcgccaaggtgccgaaattcaccgtgatcatcggcggcagctttggtgcgggtaactatgggatgtgtggccgcgcctacgacccgcgctttttgtggatgtggcccaacgcacggattggcgtgatgggggccgaacaggccgccggggtactggtgcaggtcaagcgcgaacaggctgagcgcgccggcaacggtttcagtgccgaggaggaagccgcgatcaaacagccgattctcgaccagtatgaaacccagggccacccctactactccagcgcgcgcttgtgggatgacggcgtgatcgacccgctgcagacccgcgacgtgctggccctggccttgtccgccgcactgaacgcccccatcgagccgagccgctttggcgtgttccgcatgtaacctgtaggagcgagcttgctcgcgaagaacctcagggcaacgcggtcattctcaagccccgcgttatcgttgacgatcttcgcgagcaagctcgctcctacaggaggcctctcattatcatggagctccttgcatgagcgacttcaacaccctcgaactgatcactgaccgccgtggctttgccacgctgtggctcagccgtgaagccaagaacaacgcgttcaacgcccagatgatccgcgagctgatcctggctcttgaccgcgtacaaggcgacccgtccctgcgtttcctggtactgcgcgggcgtggcaagcacttcagtgccggcgccgacctcgcctggatgcagcagtcggccgagttggactaccacaccaacctggacgacgcccgggaactggcggagctgatgtacaacctgtccaagctgaaaatccccacgctggcggtggtgcaaggcgcggcctacggtggcgcgctgggcctgatcagttgctgtgacatggccatcggcgccgatgatgcgcagttctgcctgtcggaagtgcgtatcggcctggcaccggcggtgatcagcccgttcgtggtgcaggccatcggcgaacgcgcggcccgtcgctatgccctgacggccgagcggttcggcggccagcgcgcacgggagatcggcttgctggcggaaagttatcccgccgagactctggatcaacaggtggaccagtgggtcgccaacctgctgcaaaacagcccggcggccatgcgcgccagtaaggatttactccgtgaagtgggtaacggtgccctcacccccgcactgcgccgctattgcgaaaacgctatcgcacgcatccgggtaagcgccgagggccaggaaggtttgcgcgcctttctgcaaaaacgtgcgccgagttggcagacccaggagccgcgttcatgagcacactcaccaccgtactggtggccaaccgtggcgagatcgcctgccgggtcatgcgcaccgccaaggccatggggttgaccactgtggctgtgcacagcgccatcgaccgcgatgcccgccatagccgtgaagccgatatccgcgtcgacctgggcggcagcaaagccaccgacagttacctgcaaatcgacaagctgattgccgccgcccacgccagcggcgcccaggcgattcaccccggctacggcttcctctcggagaatgccggcttcgcccgagccatcgaggcggcaggcttgatcttcctcggcccgccggcctcggccatcgacgccatgggcagcaaatccgcggccaaggcgctgatggaaacagctggcgtaccgctggtgccgggttatcacggcgaggcccaggacctggagaccttccgcgccgcctgtgaacgtatcggctacccggtgctgctcaaggccacggcgggcggcggtggcaagggcatgaaggtggtcgaggatgtcagccagctggccgaagccctggcttccgcccagcgtgaggcgttgtcgtccttcggcaacgggcaaatgctggtggagaaatacctgctcaagccgcggcatgtggagattcaggtgtttgccgaccagcagggtcattgcctgtatctcaatgagcgcgactgctcgatccagcggcgccatcaaaaggtcgtggaagaagccccggcgcccggcttgagtgtggagcagcgcaaggccatgggcgaagcagccgtgcgcgctgcccaggccatcggatatgtcggcgcgggcacggtggagtttttgctggatgcccgtggcgagtttttcttcatggagatgaacacgcggctgcaagtcgagcacccggtgaccgaagcgattaccggcctcgacctggtggcctggcagattcgggtggcccagggcgaggcgctgccgatcacgcaagagcaggtcgcgttgaacggtcatgcgattgaagtacggctgtatgccgaagacccggccaatgacttcctgcccgctaccgggcacttggcgctataccgcgagtccagcccaggccctggacgccgggtggatagcggcgtcgagcaaggtgacagcgtgtcgccgttctacgacccgatgctcggcaagttgattgcctggggtgaagaccgcgaacaagcgcgcctgcgcttattgagcatgctggatgagtttgcggtcggtgggctcaagaccaacctgggctttttgcggcgcatcatcgggcatcctgcgtttgccgcggccgagttggacaccgggtttatcccgcgctatcagaatgagttgttgccgacgccaggggccttgagcgatgagttctggcaggcggcgggcgcggcgtttatgcagagcttgccggtgggcgacgggccttgggcaagtcaccagggctttcgcgcgggcctgcctgccgaggtgtcgctgcacctgagttgcaatgggcaggatcggctggtgacgctggcggggcacaccgcacagttatgcggcgaacagttgctgactgaacatcagggcgtgcgccgtgctcatctggcggtgcgcagtgaaggcagcctgtacctgcgctgggacggcgagatgcatgccgtcagcctgttcaacccgattgcggcggtcgaggccagtcaatctcatcagggcggcctcaccgcaccgatgaacggcagcatcgtgcgagtgctcgtagagctgggtcaaaccgttgaagccggcgctcagctggtggtgctcgaagccatgaagatggaacacagcatccgagcgccccacgccggggtggtcaaggcgctgttctgccaggaaggtgaaatggtggccgaaggcagcgcgttggtggagcttgaaacggctggctagaacttcgccgtggcctgcaccactacacccaggaggcgacagccgtcggtgagcagcaccttggggtaagtggggttgagcggcaccaggtagtgctggccgctttcttcctgcaattggcgaaaggtggcctgggggttgccagcccattgggccagcactaatttaccgggctcgggcgcgatcgccgggtcaaccaggatcatcatgccagctgcaatgctcatgcccgtgggggcggtcatggcgtctcccctcactggcagccagaatgccttgcctcgggcgtggtaatcggtcaattcgtagcgctcggttctataaggcgcacgctcctcacgcagctcgcaggcctgcttccagtcgctgaccgggtaacgaaagtacgggttgtagtgcgattcccgttcaggcacttgcgcggcccgttcacgaatttccagcgccacctccaaataccccaaccccagttcggccagtacgcggttcatgtccgccaggctcggcacacggcgtttattgagccaatggccgatgccgccctgggacatgcccaggcgctgcgccagttcatcctgtgtgaccttgcggtctttcatgttggctttgaccaacgctatccagttatccatgacgcatcacaatacggtgcccattttttcgggcaataaacagtttgtagtaatccataaaacgacaggaatacgatacgtactatcatcaagcccaaggatttcgacacccaccggagtactgccgcttatgacgacccgcacgcacttaacgcccgaaacatccgaactgactgaagtaaacgacatgtgcaacagtggtgcggcccagcgcgcactggactattacttgaaagaaaatcggtcgacgccggattcggacggcgccctgttcgcgataaaaccgcaaatcagccaggaggaagcccttgtacacgcctcggacctgttgcgcagtgcagcggctaccgcctacgaatcggcgtgcagccatcaaggcaaccagcgtgatctggcgttttcggtggtgtatttgatcgatatggcgaaagcgatggtggagcggtcgttgcaggcgccaggggcggcggcaaacgcgtagcaggcacgaaagaaaaatatttctatcccacggataaaaacatttgacttgcaaatgataatgattattattgggctcagctgatcgcgagatcagtcgatagaccaagagaccttaggtcggactcttggaatatctcctcatcaggctaatcacggtttttgacccggctctttggccgggtcttttttttgccagtttccctggcgtggcttcaggctaatgaagactgtgtgttgcttgatggcgcgcatggtagcaaaagactatcgctcaaagaaagtcgtccgaacgctctagcccgtatatctgcgaattagcgcttgagaatcaatctcatagactctaagctgccgcggcgtcacggatgacgccccctcccctgcaacaatttttgcatccaggttttaccgaacccctgtgtaagatagccgccacctcactcatattcaggcaaccagactatgaccgtggccttgacctccatcaagatcagcaccgacttcgacagcggcaacattcaggtcctggatgccagcgacgcttatcagttgttgctggcaatcaaacccgacacccgcagcgatcactaccaatggttccacttcaaggccgaaggcatgcacgtggggcacacccacacctttcgcttgagcaacgcagggcgctcgtcctacaagcatgcctggagcggttacaacgccgtggcgtcctatgaccatatcaactggttccgggtaccgacacgttttgatggcgagatcctgcacatcactctccagacccggcaaaagtacgcctggtttgcctacttcgagccctacagccgtgaacgccacgactggttgatcgagcaagccctgaagtacgccggagtcaccctgctggccaccggcaagagcgctgaaggccgcgatatccaactgctgcgccgtggcaaagggatcgaaggccggcgcaaggtgtggatcatcgcccagcagcaccccggcgaacacatggccgaatggtttatggagggcgtgattgagcgcctgcaaaaagacggcgacgacgaactgaaaaaactgctggccgtcgccgatctgtacctggtgccgaacgtgaacccggacggtgccttccatggccacctgcgcaccaatgccatgggccaggacctcaaccgcgcctggcaaagcgccagccaggaactcagccccgaagtcctgttcgtccagcaacagatggaaaaatacggcgtggatatgttcctcgacatacacggcgatgaagaaatcccctacgtgttcaccgccggctgcgaaggcaaccctggctacaccccgcgtatcgaagccctggaaaaacacttccgcagccatttgagccacctgacccgggacttccagaccacccacggctacacccgcgacctgcctggccaagccaacatgaccctggcctgcaacgcggtgggggaaaagtacgactgcctgtccctgaccctggaaatgcccttcaaggacaacgacgacgcgcccaacctgcgaactggctggtcaggcgatcgttcgaaacagttgggcaaggacgtattgagcagcatcgccgatatcgtcgggcgtttgcgctaacccctgaggcgagctcttgtggcgagcgagcttgccacaagagcggtcaatccttgctaccggtcatgctttgcaagacaccatcgcgtcggatcaaaccgtggaacaacgcggccgccagatgcaccagtacggtgagaaacagcagataggccaaataaccatgagccttgcgcaacaacgcaaacaacggcgcattcgcccccagcagcgcgggcagttgcaggttactactgagcatcacagggtcaccggccgctgaaatcatcgcccaacccagcagcggcaacaccagcatcaacgcgtacaacagcacatgggaggccttggctgccagcctctgccacaccggcaaatccgctggcaacggcggctggcgcgtagagaaacgcaccgccaggcgcacgatcaccaatgccagaatcgcaatgcccagcggcttgtgcaggtggatcagccactcatggcgctccgataccgacgccgccaaacccgcgccgataaacagcatggcgatgatcatcagcgccatcagccagtgcagcacgcgcgccaagggcgcaaaaaatcgcggttgagcattcatggcttcgactcctgaggggcgctgtgcaacgggctgacttcaccggcccggcgcaggtacgaactggcatacgcggccgaacgtgcggccagcaagggatcgttggaggcttggataccactgggcagaatcagcgggtcaaagttgatatcgcggcaatcgccgtctgcctggggctggctgctttgcagcacaagggtgccagcgttgagcaccttgtgtgcgccgctccaggtcttgctcgcatcgtccagcgggtcgccggggttggccagggtcatgttcaactgccaacgcaacggcccgacagccaggcgtcgcaccaaatcctgctccaggaagtcactgcccgtaggtgcggtatcacccgccgcgtcctggctctggggcaccacctcccaacgcacggcctggcgcttgccatcggcagccaccaggtaaaacgcgttgatgccgttataggtttcagtcgcgtaactggccgatggcttggcggttttgacccaggccaggaacggcgcggtctccgggtgtgcggcaaaaaacgccggcatgctcgacgggttcggcttgcccgtggccgggtctggcgcgccggccttgagcaattggtagaacgcctcgggcgtgcccaccgggaacaccggcatgctgttcatccctgtacgccattgctggccgttggcctggctgaattgcacggcaaagctgcgaatcggcacactgctgtccggcgcgtaggggttgccgctgggcaaggcaaagcggccaatgatcggggtcttggcctcgctgaacacctgggcactggaatacgcacgggcctcgctactgctctggaaataacccgccacgcatacgcccttggcatggttacggcgaaagcccggatgcacgccgttattggtttccagggcattgaccaaggtttttggccgcaggcgctgtgggtcgagcgtgccattgacgtaagcaaatgcgccggcaacaaccgcaaccacggcaccgatgccggcgagtcgtgcgatcaggctcgcagtgctcaagggaggacggggtggtggtgagtgatctaccatgcaggaactccagggccagaggcctcaggctgaaacataaggtcggagcattaagacgaacgccgatgggctctattcccaggccctggatttattttgcgggacggggaataaccttcaacgccaaacgtctctctagtcccagcgtagtgatcagccagacacccatgcatgaactcgacgaacagttacgcgaactcatccccaggttgcggcgttttgccgtgtccctgacgcgcaacagcagcagcgccgatgacctggtgcaatcgaccctggagctcgcgatcgtcgcctgggccgataaacgtatcgagggcgacctgcgcgcctggctgttttcgatcctctaccggcagttcctcgacgcccaccgccgcaaccgccgctatgcgcgcatgctcgaattcttcaccggccgcgatgacgtgcaaccttcggtagaacgcacggtgctggcccaatccaccctgcaagccttcgaccaactgaacaccgaacagcgcgccctgctgctgtgggtgtctgtcgagggcttgagctacaaggaagtggccgagatcctcaaggtgcccatcggtaccgtgatgtcacgcctgtcccgcgcgcgccaagcgttgcgtcaactcagcgatggcgaaatgaccagcccttccctgcggagactcaaatgatcagcctgccccccagcgaacgcgatttacatgcctacgtcgatcatcaactgctggacggtgaccgtcgtgtgcttgaaacctggctggccagccaccccgaagtggcggcccaggtacaggcctggcaacaggatgcacagttgctgcgtgcgtcgttgagcggcgccctgcagcagccgtacaacccggcattggacccggcgctgattcgtcagcgcatcaataaacagtcccgtcggcacctggccacggcggcgttgctgctgatcgccgtgagcctcggcgggtttggcggttggcacgcccgcgaagccacccagccgccgctgctgccgatgaccgacgccatgcaggcctaccgtctgtttgcccaggacggcatcatgcccgccgactacaacgctcaggaccgtggcaccatgcaggcctggctcgaccgttatttcaaccaggcccatcgcctgcccgacctcagccaagccggtttcaagccggtcagcgggcgcctgctcgccaccgaccaaggcgcggcagccatggtgctgtatcaggacgcccaaggccggcgcatcagcttctacatccgcccgcctggcccgaacaacggtttcctgcctcgcggcagccgcagtgccgatggtttgcaggccgactattggtcgggcggcggctacaactatgcaatggtcagcccggtagaccaggccgccgcgctgcagacgccattctaaaaaccgacgtccaacaccacattatccagataggtgccagccggcggcgtgggctggtcggtgtagaccttggcgttgtagttgtacacctggctaccgacgcccaacccgttgccagggttgacctcggccgtggaactggcccgccgcgccgcgccgacactgccccaacgcgtggtgccggcgctctggaaaatgtcataggccaggtagttgctgccggaaatcatgcggcgccggccgccgacactcaccgggttctggccatcgctcaagcccacggtataggcgctgcccttggtgcaggcgatgttgatggtctgcccggtcaccgcagtaaacccactgaccaccggcgcgctgccaaagctgatattcggggcagtgatctggcagtcgttggtcacggtcatgttgacggtcagcgatgccgtgccgctgccaatgtcacgtcccaggcaaatgccgccaaggccgatccccgagcaataattccacacccaggcgatgctcaatgtctcggtgtacaccccggcggcgacgttgctgccagtgatgctgctcaggtacaacggcacagttttcgcgccgggcccggcgatcaggccgatgctctgggcgatgccgccagcgccgccgaaatcgaattggctgccacgggtgatgggatagctggtgctgttattgccataaatcgtgtagctgatcacatcaccggtcggcccgaccaaaccggtctggggcgaggtgatcgtggcgtaaaagtggtcggtggacaccagcagcgatatcagcgccgaggtgcaactcaaccctgagttggccgtagagctggtttgcgcggcggtgcgcaccgtcatcgaactgatcgaaccaaaactggccggcacggtggacaccaccgaacacgccgccatggcctgcccgcaaaacaacaaacctacgccatatagccctacgctgcccctcacctgaacactccctgttcaatccctcattggcacactaacggcccgatcaagggcacatcctgttgctgctcatcaatatcgaaggttgcctggcagatgcggccctcaccgagcgtgacctgcaaggtgttatgggcgctgaggttttccagatacaccaggccatcccagccgaccaccgcctgagtgttgctttgctcgtgcattaccaggctgcccagcgccaactcctggtgctggcggtccaccagggtgatgctggcggcgagcacccggcgcagcgggaattccagcagataaccgctgccccggcgtaccgacacgcgctgttccacattggggctctgcacattcgccggcaggttcaacgggtcgatctcgtatttaccgcggtagtaggcactgctccacggcaccagcaaatggccgttgcggtcggtctggcccaccagctggttttcgtagcgcaccggaatgccggcgaaaccctgggtgctcaccaccacaaacgcgtcattgatgcggttggcggcaaaggtttcgccgcccatccataccagcgagccgctggcgtccgcccaacgcgtcatggcctcgctgctgccgtacacaccggcctgcaactgcaccgactgcaagcgccaagtcaggtcggcctgccgatagctgggggcatcgccctgggcatagccgaggttgtagcccaccccgccttcgctgggcaccgcgcggctgtagttgatgcgctggcgactggcgccgtccttgctgcgctcggagctcaaggccaggctggcgttgaggtcgaacgggatgaccagttgcgcctgcatggcccagttgctgtcgccaatttcgcggttggctgacagatagaaactggtgttgcgccacagcggtttgctccagctcaggttgagcaggcgcgtgcgcgagtcgtccgccgcctgcacgtcgaaataacccaggcccaggctgccgaaacgttggaggttgaggctcagggtcacctgctcgctgcgcttgctgaggctggcgtaaggggtatcgaccagagtcaggtcggcgtagtcgtcgcggcgctccacccgttggtacataaagctgtagcgcgtgctgttgtactggtaaccgaggctcagttgctggcccgtgcggctgtcgaactggctctggctgatggcggtattgagcacgccgaagttgcccaggcgcaggttgccgccgagcccgccgagggtcaggtcgctggaggcttcggcgtggctttccagggtgaggttatcggaatagccgtagcggaacgtgccactggccacgcccggcccgtagccgaagtcccgcagggtgtagtcacggcgcaaggtaccggcggccagcgaaaaatccgtcaagccttgttgcagcaaggtgctggtgacgtagaacggcaccgtggtcgacacttggcgtcccagggcgtcggtagtgaccaccacggcctcgccggcaccgttgataaacgggatgttggtcagggtgtaagggccgggttgcaactgtgcgctgtcggatttatagccgttgataaacagatccaccgacgacggcaccgccgcctcaccggcaaactgcggcaaggggtacgtgaccaggtcggggcgcacggcaaagtcccgcgacagttgcaccccgcccaggcgcaccgaactgctccagggcagcgcgccgctgatcacgtcgccagcctcgtaggtcagcaggcgctcatcgtcggagaaacgccaggtggtgtcgtaacgtcggtaaccattgttgagggtgccgccgctgactccgtcggacagggtctggcgcagttgcccggtgttggacaaggtgccccaggtgtcgaacagccgcacttcgttccacgccgcgaggtaactgccgccgtcgtcggtgtcattgaaatacacgtcatagttgagcaaggcgccgaagctgctcatggcctgggtacgcggataggtattgcggttgccgatgaactgttcctgcagccaggaaggcggcacatccagcagcaggcgctggccgttgctgtcgtagtcgctgtgcaggcccggcacctggtccagggccacactgccgacgggctcaccgggcagtttcatgcccacgtcctgcaacgcgctggccggcacaaacagctggccggcgcgctgctcgaccgcgataacgcggccggtgtccatctggttgaccaccagttccagaaacagctgtgcatcggcaactgcctccatgctgccgggcggcggcggcaagtcgcccgccatcgctgcgccccacagcccgcttgccactgccaccgacggccataaaacccgagcccaaccacgactcaccatggcgttgtgtccttcaatggacatctccatcctgttaaaacccgggcgcgtgcccgttgcgctacataacggctatcgcttgggcgccaggctttccagttgcggcgcgccgttgacgcgtacctgcaacggctggtcggccgatacggcatccggcaccggccagcgcatgctcgcgcccggcagcacatagccgagcaaaccgtccaccaacggccgggtctgcccgccctgtttgaatgacgcatcggtaagccgcgcatgcacggcgccctggttgcgcacctcgatgtagttgcgccctgccacgttgaccttctgccagctcaactgcggcttgcccgcgcccttgggatcgcgttggcgggtagcgtcgtccttgctccacaagccggcgccgtaggcaaacaacggcaccgaataacgcatctgaaagcgaatcgccgccgccgtgttcttgccctccggcggcgtgggcacctgaagcgccgaggggatttcatcaatgatgatgcgataggccagctcctgtcccggcggcacttcccgggtgcgggtcaggcgcaccagttgtttctggcccggctcgattttggccacgggcgggctgccgatcacatcgcgctggttctggtactgctcgtcaaagccattctggctccaggcaaacacgcggatctgcaggttggcggtctcggtgccacggttctccagccacagcgcgctggcctgttggtcggcctccagcaccgggtcgatgggccagatcagcaccgaactggctgcctgtacaaaccccgccgagcacaacgcccccaaggcgaaacccacggtgcataaccgtcgcaaagcacaccccataacacccctccttaaaaccgttagccctaccacgtcagctgcacctgcagcgtgtcgctgtacgtccccccaggctgattgcccggtaaaaccacccgcccgtaaatcggcaggctgatgttgctcgcatcactgtaggtcacgctgacgctctggctgatgcccaggctctggctgaacgccgcatcgcgaaacaattggtaagccacccgcgcgctgccactgttgagctgcaagttgcgcccggtgctgctgtgcaggccgccatcgacgctcatgctcagggccacgcccggcgtgcattgcagggttacaccgccagtgagggccgccgtcaccgtgctggtggccagggccgaatagctgccgtaggccaacgtgccgtagttggaaccgccgcccacgatcaggcagcccggcgtaatggtcgcgctcacctggaagctctggttgaccaccgccgacagcggcaacggcatcgccaggccgatggcaagcaacactctgggccacatcgttagaacgtcagttccacggccaccgtgtcggtgtaggtgcccgctggcagccccgccttgcccaccgcccggccgtaaaggttgacggtctgcgccacgccggtactggtggcgagtgtcaccacgccgtcaatcgccaacagcgcggaacgcccgctgtcagtgtagaaatcatagggcacgaagttacccacgccatcggccaacgctcgggtgccaccgggggaagcgccatcgtgggcgccggcacgcaccttgatcgttggcgcggtgccagccgaacacaggatcgacaacgccccgccggtaccggtgccgccgagcaactgggcgtcggcattggtaaacaggctgttggtggtgccgaagttcaagctaccgaaattcagcccggtagccgcgcccgagccgttgacctggcaactggcgatcaacgtcaggctggaactgatctgcccggtcaccgtggtcgccgcgttcaggctggaggccagccccaggcccagggcacagaggccgattcgcgatacaagtacatgcatgatatccatcctcatggtttaccaatccagagtcaccgtcagggtgtctgtgtagatgccggccggtagggccctggtattcgccaccacggaaccgaataccgggattggtacctgggtgccctgggtcacgacgaaattgcgttgctgaccgatgctgtaggcactgcgcccctgggggtcggccgagagtcgatagggaatggtctggcggccattgctcaggcgccgcgtggtgccgtcgccgttggcgccgccgtcgatggtcaccgtgaaactgctgaccaccgaggggttacaggacaccgacagcggcgccttgtcgccatcggaaatcgccgcgcccaaggtctcgttccacgtcggcccctggctgccaaagtccaacagcgcggtgccgccttcgggcgtgaccggcgcggtttccacgcccttgctcacttcgcaactggcggtgatcaccaaccgtgcgtggacttggccgttgaccaccgccgcctgcgcgtcatccgccagcaacagcaggctgcccagggccgtcacggccaggtagcggcttaccatgtgaccgtgaccttgagcaggtcggaataacggccgacggcggggatgtccttgagtggttcgatgcgcccatacagcggcagctccacggagccggtgtccggcacacggccactgatcggcacgtccaccggcaaggggataagccgcgcggcgtcggcgtagattcgataggggatgggccggctggaaggcgccgcagtggccagataacgcacttcacccacaccgccatgcaggccgccgtcaacgcgcacctggtaaggcgtgtcggggttacattccaggcgcggctggcgctggctgatcagggccgcactcagggggccggccgggtcatccagacgcgggccgctgccgaaatccaatacaccaagttgctcgatgcccgcactacgggtggtgcccaccaactggcaaccccgttgcacgtcgatacgcacctgcacctggagttgcgcagcaatcgccgcgttgcagagcatcgtgcccatgactgccaataccgccggtcccttcacagccccaattccttatacaggggtgacaactgtgtatgaggttagccagttaacccgaaagtgccagtttgcaaggcttggggccgttcgctattggtcaaatggcatcgagcgtcttacagtgagcgaccaccgcaatacagagtgtttattcttggccgtgcttgccctgctccagcgcctgctgggtaaaaaaaccgacgcctcggacgcctcgcctatcccggcatattttcaacaaaaggccgcacaacagggttataccctcagtgatgggcaaatccgggcgattagcgccctgaatcgcgaggcccaatacctgctcaccggccaggccacgcgcagcctgtacctgcatggcccggtggggcgtggcaaaagctggctgctggacggttttttccaagcactgcccatcgccgagaagcagcgcgtgcatttccacagcttcttcgcccggctgcaccagggcatgttcctgcaccgcgggcatgacgatgccctgggcgtcacgctggacgagctgctggccggctgccgagtgctgtgttttgacgaattccatgtgcacgatatcggcgatgcaatgctcatcagccgcttgttcaaggccctgttccagcgcggcgtgctggtgctggtgacttccaactatccgccggaaggattgctgcccaacccgctgtaccacgaacgcttcaaaccggtgatcgagctgatcgccgcgcgcatggaggtgctggaagtcagtgcgcctcaggactttcgcagcctggctcaggcccacgcgcaacaacgcttcacgggcggccagtacgtctggccaggtacggctggccagcgtgaaaacctgggcctgcctgccacagattgcccggcgcaaaccctgaaggtcggcactcggcagttacaatgccgaggccatcaggcacgaaccatcgcgttcaccttcaacgacctgtgcgaacagctcacggcggtcatggactacctgttgttgtgccaggacttcgaccactggatcatcgacggcctgccgcatctggccgaatgccccatcgccgtgcaacagcgctttatcaacctggtagacgtgctctacgaccaggacaaacaactgacacttatcggtcaccagcccctggataaatgcctggaaggccaggccatcgacctcgcccgcaccgccagtcgcctgcggcaattgcacacgctatgcccgcaaaccgcgcccgagcggctatcatgagcgccttttacgccctcttccgagcaccacgcctgcatgaataccctcgcccaactcaaggctggccaattggccggcgcgatgcgcctggacctggcctgcgggctgaccgagttcccccgggaaattttcgatctggccgactcgctggaaatcctcaacctcaccggcaacgcgctgagcagcctgcccgacgacctgcaccgcctgacgcacctgcgcgtactgttctgttcggacaacgcctttaccgaactgccacaatgcctgggccagtgcgcccagctgagcatgatcggcttcaaggccaaccagatcagccaggtgcccgccgccgccctgccgccgctgttgcgctggctgatcctcaccgataaccgcatcagtcagttgcccgatgaactgggccaacgcccattgctgcaaaaactgatgctggccggtaaccaactgactcacctaccgccaagcctggcccagtgccaaaacctggagttgatccgcatcgcctccaaccgcctcactcatctgccgcagtggctgctgaccctgccgagcctgacctggctggcctacgcaggcaacccggtggaaatggccgtgcaggtgagcagtgatgaggcgacgccgaacatcgcctggcaggaactggaaatgggcgaagtcctgggcgaaggcgcctcggggattattcgcaaggcgctgtggaaaccccgtgcggtgccggtcgcggtcaagctgtacaagagcaccatcaccagcgacggttcaccgctgcatgaaatgcaagcctgcatcgccgccgggctgcatcccaacctgatcaaggttgaagggcgggtcgtcggccatcccgataaccaggccgccctggtgatggagctgatcgatccgagttaccgcaacctcgcggccctgccgagcctggcgtcgtgcacgcgcgacatctacgcccccgacacccgtttcagcctggatgtggcactgcgcatggcgcggggtattgcttcggtggcggcgcacctgcatcggcacggcattacccatggtgacctgtatggccacaatatcctgtggaatgcagcgggtgattgcttgctgggagactttggcgcggcgtccttccatgccacggcggacacgttggaaacccgtgcgctgcagcgtattgaagtgcgcgcgttcggggtgttgctgggggagttattggagcgggctgaggccagtgacgaacgcttgcaggcactgcaacaacgctgctgccagccggatgtgctggcgcggccgggctttgaagaaattgaggtcttgctcgaatctatgcaacaccactaaaccaatgtgggagcgggcttgctcgcgaatgcggtggaacagccaatacatctgttgactgtcacaccgcnnnnnnnnnngagacaggcaatacatctgttgactgtcacaccgcattcgcgagcaaccccgctcccacaggttgaccgcgtgtactcagataaacatcagcccgccaggccgacaaacatgtcctgcacatcatcatggttgtccaggccttccaggaacgcctcgacttctgccatctgctcatcggtcaaaccgctgaccgggttcttggagatataacccagcttggccgacagcacggtgaagccctgctccggcaaggccttctgcacggcatccaggtcggtggtttcggtgatgaacaaggtggcgccttcttcaccctcttcaaagtcttgggcgcctgcttcgatggcggccatttccggatcggcgtccggggtgtccggcgatgcttcgatcagcccgacatggttgaaatcccaggctaccgagccggaagcgcccagttggcccttgcggaaggccacgcggatttccgccacggtgcggttgatgttgtcagtcacgcactcgacgatcaaaggcacctggtgcggcgcgaaaccttcgtaggtgacgcggtggtattgcacggtttcaccgagcagaccggcgcccttcttgatcgcgcggtccagggtttccttgggcatcgaggcctttttggcctgttccaccaccaggcgcaggtgcgcgttggtcgcggtatcggcgccgttgcgggcggcgatggtgatttctttcaccagcttgccgaagatcttgcccttggcattggctgccgcttctttatgtttgactttccactgtgcgcccatgactcactctcttatttccatcgcgcccaaacgtctactggccggcgctttgggggcagagtttatagcgcgagaacgcttcgttccaccaaaaaaccggccaaggccctcaggtgcgcaagggtttgatcaccgcattgcggtccggcacaaaatccccggcctgggccagtacggcgggcctggcattccagtagggcatcagcaccagcgaagaaaacagcgccgcaccggcaaacacaataaataccgtaacggtatcgaaatagcctggcagcaaaccgcccagaatcgcccccaccgaaccgcagccgttcacaaaacccgcggcggtagcgccggccttggcggtgccgaagtcgatggccgcggtgctgctgatcattgagtccggcccatacagcgtcaggcccatgacaaacagaagggccatcaccagcaccacactgccggtgtgcagcgcgcccatgaacaacgccagggcaaccgtcagcgccaacaggctcagcacacaggcgggcatgcgccgggcgccgaacagtttgtcggaggccaggccgatcagcaccggccccagtaaaccagccaactcaaacgcggtgggcacaatggcggcaccgaccttgcccaccgacggcatctgctcgtagacgatcaccggcccccacaacagaatcgcgtagcgcgccggcttgagcaggaagtacgccagccccagggtcaacaccgtgcggttgcgcaggatcgcgcgcaggggttcgagtacgctgacgcgctgctgggcggccaactgctcggcgctcagcatcggctcgggctcgggctcgactgccggcaagcccacatcctgcggggtattgcgctggaacataaagaacaacacggccaccaccgctaccactgcggcactggaaataaacgccgcgtgccaactgccgatcagcgtataggcccaccaaccggcaaacggtgacgcgaccaacccgccaaacgcgtaacacgaactccataaccccaacacccgcccccgctgctgcgccgggaagaaactgccaaggttcttgcataaccccgaccagccggtggactgcgccaagccctgcactaacatgcaagtgacaaagatcggcaaggtggcaaaggtgcccatcaccaacgccgcgcctgcggaaatcagcaagccaccaagcaccaccacccgtggcccgaagcggtcggcaagcatgccccaagtgaactggcctacggcatacgcggcgaggtagaggccatccaggttggccatcatcattttgtcgagggggaaactcgggtcgtcgccgatccccagcttcgccactgaaaacgctttgcgggtgaaatagaacgcggcatacgccagccaggtgatggcaaaaatctgcacgcgccaacgcttgatgctacccatagggatattcatggtggttctgacctcaggtgtgagtgtgccggcagaatcgaaagaaaacgcctgttgtttttatggttgagcactgcaatgccgggccttgaagagcgcggtattggtcagatgggtgcggtgtgcctgcgcccatggcggccgtggttgtaggactcaacctacggcgactgaggtgcatcaaagcaatggctgactcataggtaaaatcgatttatcgtatttcaaatataagctcagcttttaagaggacgtgccatgtccgtttcccatgcccagctcaaagccttccatgcggtggccattcacggcagttttaccggggcggccgaacgcctgttcctgacccaacctgcgatttccgaccaggtgcgcaaactggaagagcgcttcggcgtactgctgtttcaccgcaacaaacgttcggtgcgcctgaccgatctgggtgagcgcctgctgggtatcacccaacgcctgtttgtgatcgaagccgaagccgaagaattgctgcaggattcgcgcgccctgctcaccggcaccctcaccctggcagtggatgcacccgtgcacgtactgccgcaggttgcgcgcttctgccagcgataccctgggatcagcgtgaagatcgaaaccggcaacaccgatgagtcgctgtcgcgcctttacaactaccaggccgacctggcgctgttggggcgcgatgtcgatgatgcgcgcctgttgtcactgccgctgcccgacgaccaacttctggcttttgtcgcacgtgaccatgcctgggccgggcgcgaatcgatttgcctggccgacctcgataacaccccgctggtgctgcgggaaaccggctcggtcacccgtcagaccctggagcaggaaatgcgccaagccggcctgcgcattcgccccgccatccaggtggaaggccgcgaagccgcccgggaagccgtggtggtggggattggcgtaggcgtggtgtcggcggcagagttcggtgccgacgcgcgggtatacgccatgccgatccgcgattgcacacaacgcatgaaagaaaccctggtgtgcctgaaagagcagagttcacgccgcgtggtcgcgaccttcctggagatcgtgcgtgaaagccttcacgccaactcgaaaaacgcctgaatcaagcgcagcgagcggcgccgctccatgcagccgagcatgtgccggttcagcaggccatcgccgaggatcggtaccgcctgtacacgcgggtccgggctgacctccatcgacgacaccacgcccacgcccaattctgccgccaccgcttcggtcacggcttcacgactgtccagttccagcagcactttgggttgcacattcgccgcaaggcacgcgtcatcaaaagtgcgacgggtaatggagttgggctcgcgcagcaccatgatcacctcatgcaactgcgccaactcgataccgtcaggctgcttggcccacgggtgcgcggccggcaccaaggcgcaaatccgtgactggtccaagggttgcaagtgcaggccattgcgcggttccacctcggtgagcaccgccacatccgcatgttcggacagcagcgccgccagggtttcctgggcattgcccaaacgcaggttcacggtaatgccggggtagcgcgcgcgcaggctggcgatcatcggcatcaccagatgagggccatcggccgccacttccaggcgcccggtgagcaactggcggttggcttccagcatggtttgcgcctcgtcgaccaaaccgaagatcgcccgagtgatggccgccaggcgtgcgccctcctcggtcaactccacccggcgtgcggtgcggcgcaacagcgggatctggtaatgctcctcaagcgccttgatatgcccggtgaccgccggctggctgataaacagccgagccgccgcgcgggtaaaactgccctcgcgggccacggcatcgaatgcacgcagttggaacaggttcatagctatcggcctcactgatagctcacataacaacaaacaatttgattgatgacaagccaaactgcaatttaggcgccgtagcttgaaccccgacaccttgcgaggatttgacatgcccactgccgcgccgatcctgttgacccccggccccctgaccacctcgaaccgcacccgccaggcgatgatggtagattggggttcgtgggacgaccgcttcaaccagctcacagccagtgtgtgcaggcagttgttggcgatcctcaacggcgccgagagccaccactgcgtgccgttgcagggcagcggcaccttcgccgtcgaagctgcgatcggcaccttggtccctcgcaatggcaaggtgctggtgttgatcaacggcgcctacggcaagcgcctggcgaaaatctgcgaggtgcttggccgccaattcagcatctttgaaaccgccgaagacgagcccaccactgccgccgatgtggatcgcctgttacacgccgatgccgccatcacccacgtcgcgctgatccattgcgaaaccagcaccggcattctcaacccattggcgcagatcgccgaggtggtcaaaagccacggcaagcgcttgatcatcgacgccatgagttccttcggcgcgctgccgattgatgcccgcgaaatacccttcgacgcgttgatcgccgcctctggcaaatgcctggaaggcgtaccggggatgggctttgtctttgccgaaaaagcggcgctggctgcatcccagggcaactgccattccctggcgatggacctgttcgaccagcacacctacatggccaagacgggacaatggcgcttcacgccgccgacccacgtggttgctgctctgcatgaagcgctgttgcaatacgccgaggaaggcggcctgcccgcccgtcaccagcgctacgtgaataactgccaggcattgctggacggcatggccgaactgggcctgcgcagttttctgccgtcggcgatccaagcgccgatcattgccaccttccacgcccccacagacccgcgctaccagttcaaagacttctacgaacgggtcaaggccaagggtttcatcctgtatccgggcaaactgacgcaggtggaaacctttcgcgtgggctgcatcggtcatgtcgacgcggccggcatgcgcgcagccgtcaaggccatcgccgaggtgctgcaagaaatgtgtaggagcgagcttgctctcgaagcgcgttaacgatgacgcgggcatcctgagtcaacgcggtgcctggatgtttttcgcgagcaagctcgctcctacagacatgaatgccattacccacaggatctgaatcatgaactatcaaaaccccaacaccctccaggccgttatcctcgactgggcgggcaccgtggtcgatttcggctccttcgcccccacgcagatttttgtcgaggccttcgccgagttcgacgtgcaggtatctatcgaggaggcccgtggcccgatgggcatgggcaagtgggaccatatccgcaccctctgcgaccaaccgcaagttgccgaacgctaccgccaggcgttcggccgcacgcccaccgacgacgacgtgaccgccatctaccagcgcttcatgccgctgcagatcgagaaaattgccgagcactcggccctgatccccggcgccctcgacaccatcgccgccctgcgcggccaaggtatcaagatcggttcctgctccggctaccccaagcaggtgatggacaaggtcgtggccctggctgccaccaacggctacgtcgccgaccacgtcgtggccactgacgaagtgcccaacggccgaccatggccggcccaggcgctggctaacgtgatcgccctgggcattgatgatgtggcggcctgcgtgaaggtcgacgacaccgtgccgggcattctcgaaggtcgccgtgccggcatgtggaccgtggccctgacctgctctggcaacgcgctgggcctgacctacgagcaattccgcgcgctggacaccgacacactggccagcgagcgccagcgcatcgaagcgatgttcgaagcttcacgtccacattacctgattgacaccatcaccgatctgccacgggtcatcagcgacatcaaccagcgcctggcccgcggggaaatgccgcaggcctactgaccgaggtcaagacaagggcagtggcaacaagcgcagcgctcaaaacaggcatacagttaatgcactccatcgctaaagaatggaggtacgccctgatgagtgaggaacacagcgatgccgtggaaaaattccgatacacgctacagcactatgtccattgcgttgcactggttgatggtggtactgctggcggtggtctacgcctgcattgaactgcgcggccaattccccaaaggcagcggtgcgcgcaccttgattgttgaaatgcacttcatgctcggccttaccgtgtttgtactgatgtggctgcgcttgtttgcacgtagcctgggggtggcgccgaagatcgtgccggcgccgccgcagtggcaaagcctgctggcgacgctgatgcacgctgcgttgtatgcgttgatgatcggcatgccgattgccggttggttgatcgtcagtgccgaagggcattcagtgatgttctatgggatggaattgccgccgctgatcacggaaaacaaagcattggccaaggaaattgaaggctggcacgtgctatttggccagatcggttactggctgatcgggctgcatgcgttggcggggatctttcatcattacgtgatgcgcgataacacggcgctgcgcatgatgcccaaacgcaggtaacgactttacctggcactccaagcgtgccaggtaaaccatcctacatcgtctatacatttcctactttgtagtttcgatttaacgcttttagcttgggattactcccacgacatccatcagaaagaacccgtaatgttttgtcgcacggcagtgctccagcaattgaacactcgcctctgacaacgaactgaacgggatttttatggaaggcgcctcaagtaactgtcgccagcacacttgcgcggatcagggagatgctacagcacctccgacgttcagccagtggtatgtcttgtgtgacttcgacgggaccattacccccaccgatgtcatcgacaacgtcctccannnnnnnnnnnnnnnnnnnnnnnnnnnnnnnnnnnnnnnntcggcggtttgtccatgggggccgtgatgtcgatgtatgtggcgtccgaacacccggggcaagttgccgggctgttgttatattccctgaccttgcgtaacgatggctggaacgcctcatccgtcacacggttaatgccttgggtaactcgaattccctttgtgttggacttttgcgtcttcaatgagcggccgccgttcggtattaaaaacaggcggttgcgagccattgtcgaacggcagatgaaaatgggtgaaagcagtgctgcaggcttgctgagcatgtctggcaagagtctgcggcaaatgcataaactgacgacacgagtgaaacggcgcatgccgttgatcaacgcacccgcgctgatcatccactccatcgaggatgatgtcagtggcaggtggaacgccgattacaccgaacagaaactcgcaggccctgtcaccaaagtgctgttggataactgctatcacatgattacggtagacctgcaatacaaggaggtggttgccctgagtgcccacttcattgaaagccatatatctatttgaggggaccagcaggcagccgacgcctcattgcctgatatttatcagccccttcaaatgggcgccacacttcggcggccttgtaagccgccggtatggacgaagatcaggcgagtggcgggggcgaagcgtccggcctcgatctgctgtttcaacgccagcagcgccttgccggtgtagagcggctccagcggtagaccgcacgcttgttcggtgcgctggataaagttgagcaacagcggatcgaccttggcaaagccaccgcgacaggcgtccagcaatgtataaccgtcctgcacgatggcactcacgttctgcgccacaccgtggtcatccggcaccgccatggcgccatacacccgatgcgcacccgcctccgccagcgccagccccgccactgtcgtgccggtacccgccgccaaccaccaggcatcgtaatcgctccaaccgagcttgcccaactgcgcccgcgcctgctcgaccaatacgccacagccctgcgcaccggccagcccaccgccgccttcgggtatcggatgaaagccaggatactgctcgcaccaaggcaaccagaaacccgcttcatgccgcgcccgataaccgccataacccagccaatgcagctgcatgccgaaggctttaaggtcgagaaccgtgggggtgtcttgaggatgacctcgcagcaggccgaccgtgggaaaaccaaagcgcttgcccgctgccgccagtgcatgcagatggttggagtaagcgccgccgagactcatcacccccgcggccccggcgtgtcgggcctgcaccaagtgcttggtgagtttgaaccacttgttgccgctgatcagcgggtcgatacagtccaggcgcagcacggccaactcgactccgttcagccagtccagttgcaaaggttcaaggagcgcgtgaggaagccagtcgaaagggcccatcggcaggtatctgaatgaaaaaaggggcggtagtctaccaccgcccctcttgacgccttacagctcggccgccaggcgcgagccctggttgatggcgcgcttggcgtccagttcggccgccacatcggcgccgccgatcaggtgcacgttctggccggcagcgaccaggccgtcgtgcaattcgcgcagcgggtcctggccggcgcagatgacgatattgtccactgccaggacttgcggctcgccctcggcgccgatgcggatatgcaagccttcatcgtcgatcttcaggtactcgacactgttgagcatctgcacctgcttgttcttcaaacccgtgcggtggatccagcccgtggtcttgcccaggccgtcgcccaccttggaagccttgcgttgcagcaggaacacttcacgggccggcgcatggcgctcgggtttgatcccggccacgccgccacgggcttgcagttgggtgtcgatgccccattctttccagaacgcctcgcgatccaggctggtggatacgccttggtggacgagaaattcagacacgtcaaaaccaatgccaccggcgccgatcaccgccacgcgcttgcccaccggcttgcgttcgaggatcacgtccaggtaactcaggaccttggcattgtcgacaccgggaatcgccggggtacgcggtgcgatgccggtggccaggatcacctcgtcataaccgcccgccaccagttgcgtaacgtccacacgggtgttgaggcacagctcgacgtgggtggtctgcaatttgcgcttgaaataacgcaaggtctcgaagaactcttccttgcccggcacgcgcttggcgatattgaactggccgccgatctcgctggcggagtcgaacaaggtcacctgatgcccgcgctcggcggccacggtagcagcggccaggcccgcagggccggcgccgaccaccgcaacttttttgatctgcttgaccggcaagtaattgagctcggtttcgtagcacgcccgcgggttgaccaggcaggtggtgagcttgccgccaaaggtgtggtccaggcaggcctggttgcagccgatgcaggtattgatctcatcggcgcgcccggcggcggccttgttgacgaactcgggatcagcgagaaacggccgcgccatcgagaccatatcggcgtcgccttcggccaggatctgctcggcgatttccggggtgttgatgcggttggtggtgatcagcggaatctgtaccgaaccgcgcaatttggccgtgactttactgaacgcaccacggggtaccttggtggcgatggtcgggatacgggcttcgtgccagccgataccggtgttgatgatcgtcgcgccggcctgttcgatggccttggccaactgcacgatttcttcccagacgctgccgccttccaccaggtcgagcatcgacaggcggaagatgataatgaagttcgggcctacggcttcgcgtacacggcgcacaatttccacggccaggcgcatgcgattttcaaagctgccgccccaacggtcggtgcgatgattggtgtgggcggcgaggaactggttaatgaagtagccttcggaacccatgatttcaacgccgtcatactcggcgacctgagccagcagcgagcaggtgacaaagtcctggatctgtttttcgatgccctcttcatccagttccttgggcttgaacgggttgatcggcgcctggatagcgctcggtgccacctgcttggggctgtaggcgtaacgcccagcgtggaggatctgcatgcagattttgccacccgcgtcgtgcacggcctgggtgacgatcttgtgcttgcgcgcctcgtcttcggtggtcagcttggccgcaccggcatacacgccaccttcatcattggggccaataccgccggtgaccatcaggcccacgccgccacgggcacgctcggcaaaataggccgccatgcgctcgaaaccgccgggcttttcctccaggccggtgtgcatcgagcccatcagggtacggttgcgcaaggtggtaaaacccaggtccaacggggccagcaggtgcgggtaggcagcagcggtcatggtacagctccacaacggatcatcacgggacgtggcgcactcgaacggcgtgccatcggtttatgtcccacagactaagaggcggtggaccacggctcaatgactgaaactgacaagttattgatccaaatgcacagcgccccttggcaagccacgccatgggccctaccctagtcgcgaaccctgcacttggtctgttgtctgttgccccatgcgtaaacttctagcgttcaccgtcatcatggccctggttgcctccctcgccgcgtacttggtctggacccaggagcgccccgtggcgcattacctgtccgacctgcgcatcaccctcgccgtcaatgagggcgaaccggccgaccggggcaacctgctgggcatccagccggagctgttccctgccgattaccagagcctggaacgcctgcacctgaagctgtcggcctacctgcaaaacgctcgggacctggggctgatcaatgccaagaccgtggtggtgctgccggaacatatcggcacctggctgatgctcggcggcgaaaaaaacgagctgtaccaggccgctcatctcaaggacgccatgaactggctgtcgatcagcaacccgctgcaatttgccaaagcctggatcagcgccaccggcgacaaccgcatggatgatgcgtacctgcgcatgaaagccccggccatggcccgcgactatcaagtgttgtttggcggcctcgccaaagaatttggcgtgaccctggtggccggctccatcgccctgcccaacccaagcgtgatccagggccaactggaaatcggccatggcgcgctgtacaacgccagcgtggtgtttgccgccgacggcttgccgctgggccaaccgcagcgccagctttacccgatctacgatgagcgtggctttatcgagccgggtgatgagcatgccgtcaacgttgtcgatactcccgcggggcgcctgggcatcctggtgggcagcgacagctggtacccggacaactaccgcaagctcaacgagcaaggcgcgcaattgatcgcggtgcccgcttttgtgaccggccgcgacacctgggagcgtccgtggcgtggcttcaagagcgtatccacgccctctgaagtgagcctcaagcctgaagaaaccagcgagggcgcagcctggcgtcgcctcaccctgatcagccagccacccgtcagccaagccaccgcgggcatgagcgtctttctgcgcgggcagttctgggacctgggcagcgccggccagagttttctcagccgcaatgggcaagtcttcgccgatggcgacgctcgtggtgcgcgcctgctgaatatctggctgtagcgccgtgaagccggtgcgcctgggggatctgtcggtgggcttcgtgcataccctggccgacgccatccacagccacggcctggacccgcagcccctgctgctgcaatacggccttgatccggcgcgcctggctgaagccggtgcacgcttgtcgatcccgcgctacatgcgcctgggccacgcggccatccagctgaccggcaaccccggcctgggcttgcgcatgggccagctcagccgcttgagccaggccggccttgccggcgtcaccgccgcacaagcgcccactgtgcgcgaagccgcacgtacgctcacacgctttgaagcgctttacggttccaactatcgcgggcaatcaagctttcatgaagacgccgaaggcgcgtggctgcggttttattccatcagcccctacaacgcctacaaccgctttgtggtggattcgatcatcgccggctggttgcagcagctgtccggcctggcgcaacagccggtgcaggcccagcggattgaaatcgagttcgacgcgccggactaccacgaccactacaaggtgctgggagagggtgtggtgcacttcggcgcagaggtcaatcaactgcgcctcagccaaccgaccctggcgctgcgcaacccacagcattgcccaagcacctggcacctgttgctacaactgtgtgaaagggaattggagcaactgactcgcacccgcagcctgcgcgagcgcattacccgtttgctcgggccgatgctcaatggtggccgggaacccgacctggaggaagtggcggcacgcttgaagctgcccacctggacattgcggcgcaaactggccgaggaaggcacgcagtttcgcgcgattctcaatgacacccgtcgcgacctggccatgacctacattcgcgacacggaactggcgttcggcgagatcgcctacttgctcggttttgcttcagcccaagccttccaaagggccttcaggcgctggaacaaccagaccccaggggaatttcgccgcagtcagcgccactccgcctgaagtcggtgttacagctcggtggcatcgtcggctgggtccagtgggtctagctcgaatgcctggtactccagcagttcttcctggtaatcgtccatggtggactccttcttcatgttgaaagcggttgcagattaatgacctgcgaacccagcctaaagtgccgtcatgacgaaaaaatgtcgacgtcgtgacattcctgctcttcaggattaaacgtagcagcgatcacaggatttagcttaaccgcaacctcgcacaacatgtgggacctagcttgcctgcgaagacggcctgacagccgacgcctatccacctgacaccccacggtccaactgtgggagctggcttgcctgcgatgacgcactgccagccgacacctatctacctgacaccccacgatcaacctgtgggggcgggcttgctcgcgaaggcggccttgtggtcggccatttagttgggctggaatgagtacatatccattcctgcggtaacggccacttagggttccgccctgacggcgtcttacttttgaaaagccggattgccggcccagtcaaaagtaagcaaaacgctcttgccccaccactcggcacctcgcttgggctcggtgtgcccgtaatccgccagcgtggtttgacggggcgcttaagatcaagatcaaaagcagatcaagagcaagagcggctcgcttcgcatcgtggttactgttgagcgctacagagttgtgtcgatacctatgctgcgatagcgacctgtcagccgacgcttctctacctgacaccccgctcccacattcgagcattgcgttattgcgcaggcatcggaagcggtggaatcgcttctgtcggcgccggcaacgtaggatcagtcggcgccggcgccaccggagcaggctctgtcaccggcgcgatcggtgctgcctcaggtggcggcgcaagcggctctgcagcggcgggcgctacaggcacctccttcggcgcctcgaccttctcggctgccggagcggccttgggctcgggcacgcccaggtcggccttgggctgctcggggatatgctcggcctgcttcacttcctgcggcaggaacacgtccaccagcgcgaagtagcgctcgtagaacttgggtgccgagacggtctcgctggccactttcaccatcgaatcatcggtggagccaatcggcatcgacaccgagcccagcacgcccacgccgaggctcgcggagttgttgaccttcttcagcgcatagcggtcctgcaaggcgttggcaaacatcgtcgagtgattgctgcccttgccatcagcggcgcacaccacattgaaactgatctgcaggtgggtctcgccggtctgctggaagctcttgttgccggccaccaacttcggatcgctactggtaatgatgtagccctgactcagcagggcacggcgcgcagcctcacaggccgccacatcgctcaccgggtaatcgcgggaaaacgtaccggagtcgtcgaaattctcatgttcgtagatagcggtcttgggtgacgagcagcccgcagcgcccgccagcaccagcgccaacccgagagtgcgcaagtgaaatgatgtcgacattgaaaatcctgaagaaaacggtccggacggtattgtgcaacagaacacgacattgaagcgcgattcctgtcggtaaaacatctcaggcttagacagcagcatcagtaggaaaaagcctggcacacataggatcgataaagatccgtaatgtgcgcggctctatgacaagtttgtttacaacttattcctcacctttctatcatcgcccctgggtgcgctgctgcataaagcacggcgcaggttaaaagccaagcattggtcgggccgccaatggagatttgtcgtgcctgataaacaccccgccatccctcgcccccagcgtttgactgagggcgcgctgtccgcccttgagcgcttttcacacattgaagccgtcagcggtatcgtgctgctgctggctgccatcgttgcgctggtgtgggccaacagctccgccgccgcgacctacgagcatttctggaacacgcccatcaccctcgggctgggcgactacagcgtgtcgcgctccctgcattttctagtgaatgacgggctgatgaccatcttcttcctggtggtcggtgccgagatccgccaggaaatcaaagacggcgccctcgccaacctgaagctggccacgctgccattaggcgcagccctgggcggcgtgctgatgccggcgctcatctacaccctgctcaaccacggcactgccgccgcaggtggctgggcggtgcctaccgcgaccgacatcgcctttgccgtgggcgtgctcgcgctgctgggcaagtcgatccccagtggcgtgcgtatcctgctgctggccctggcgatcatcgatgacattgtggcgatcctgatcatcgcgatctttttcaccgccagtctcgactacatgggcttggtgattgctgcaggcgggctggccctggtgctggtgttccaacgcatgggtatcagcaaggcggcgatctacctgctgcctggcgctattgtgtggtttggcctgctcaagaccggcgtgcacccaacgctggccggcgtgatccttggcttgatgaccccggtcaattccaagcccacccgggaacgcccgctggaaaccatcgaacgcaccttcaacgaactgatggaccggttctcgcagccggccgaaggggcccagcaagtcgccacgcccctcaagcaattgcgcgaagcccagcgggaaatactgccgccggtgcagcgggttcaatcggcgctgcacccgtgggtagccttcggcgtgatgccgctgtttgccttggccaacgccggtgtgagcctggacggtttcaatctggatgacccgctggcccacggtgtgttcatgggcgtcatcttcgccctggtgctcggcaagcctctgggcgtgatgctggcgagcctggcgctggtcaagctgaacatctgcaagctgccggacggtgtgacgtggacgggcgttggcctggtcggtctgttggcggggatcggttttaccatgtcgatctttatttcgtccctggcattctccgacccggccctgctgtcggctgccaagctgagcgtgttggcggcttcaaccctggcggcggtgatcgggttgacgtggggcaagctcaagtttgcagccaagaacgcctaaagcgcattcagcactcactttatcaagggcaaaaaaagaccccggccttttcaggtcggggtctttttattcaggccggcatcagtacttcttgatgtctgcctgggtttccaactgcttgcggtaggccgcgaaatcctgctggccaatacgggaagcgaggaagcggcggtattgcgccttttcttcgtccgtaggggccgccgcttcgttcacgccgttcaagcgcacgatcatcaggctgccatcgcgcagggtcacggtggtgaaggtcggtttgtccttggccgcaggcttgggcatgcggaacaaggcttgcagcacggccgggtcgatagactcctggccacgggtagccgcctcagtcaccttccaggcctgaccgtcaaccggctggtccagcgcggtcttgccatcacgcaggctggcgatcaactcgtcggcacgggctttggcggcagcgctcgcgcgctccttggtcatctgggtgcgaatggccgcagcaacgttctccagcggcaattgggccggcttgagatgctctttggcacgcagcacgatgatggtttccgggtcgagctcgatagcgctgctgttggcaccttcatccagcacttccggactgaaggctgcagtgaccacggcacggttggccgcaacaccttcgccaccttcacggccaaacggcgccgaggtgtggacggtcagcttcaagtcagacgccggctgggccaggtcagaggcttcgaatgccgcatcttccaattgcttggtcgcttcgacaaaacgctgttcaacctgctgggccttgagctcgcgggtcagcttgtctttcaggctggcgaacgatggcacttcaggcgcttcaacgcccagcaacttgatcaggtgccaaccgaaggtggtgcgcaccggcgccgacacctggtcttgcttcaagccgtacaaggcggtttcgaagtccgggtcgtaaacaccagggccggcaaaaccgaggtcgccgccattgttggccgaacctggatcctgggagaactccttggccagggcttcgaacttctcacccttggccaggcgcgcctggatgtcttcgatcttggccttggcttgcgcctcggtgaccttgtcgttgacttcaatcaggatgtgcgcggcacgacgttgttcagcgaggttggcggtttccttctcgtaggcggcctgcagctcatcgtccttgaccgtaacctggtcgaagaaggacgacttcttcaattccagatagtcgatgaccacctggtccggggtcatgaactctttggcgtgctggtcgtagtaggccttgacctcgtcgtcggtgagtttcaccgccgcagggtcagccttgatgttgacggtggcgaaatcgcgggtctgtttttccaggcgggcgaatgccagcacctcggcgtcggtcacgaaaccactgccggcgatgcctgcgcgaacctggccgatcagcatttcctgggtcagcatctgacggaattgcaggcggctgtagcccaactgacggaccacctggtcaaagcgttcggcgttgaacttgccgtctacctggaattccggcgtctgcaggatcacctggtccagcgcagcttccgagaagccaaacttggaatcagcagcgccttgcagcagcagcttacggtcgatcaggcccttgagggcagcatcgcgcagcagcttttcgtccagcagggacgcgtcgaaatccttgcccaactgttgcatcagctggcgccgttgcatgtcgacagcctggctcagttcggtctgggtgatttcttcaccgttgaccttggccacgtcctgcttgttattacccgaagcctggaaaatggcttcgataccggtgaacgccatcaatgcgacgatgatcccgatgatagtcttggcaatccagccttgtgaattgtccctgatattttgcagcatgcgtcccccagaaacggttgaacttcaaaaattaggcaaccgtggagcgtgggtagagtccggatagaagaaaggcgcatccgaggatgcgccttctcgtaactggcggagcggacgggggttcgaatctgcacccccggcgtggcgacccgatacgtgggtcagctaccgctccgctgccaggccagacctgcgtccgacccgggtaagcaaaggcttgaacgaagcttagttaacggcttctttcagggctttaccggctttgaaacctggtttcttggcagcagcgatttgcagtgctttgccggtctgtgggttacggccagtgcgagctgggcggtcagtcacagagaaagtaccgaagcctaccagtaccacggagtcgccggccttcagagcgccagtgacggattcgattactgcgtccagcgcacggccagcagcagctttcgggatatcagcggatgcagcgatagcatcaatcagttccgacttgttcactctaagtccccttatatatctattgagtatgattctaagttttttggtaaaaagcaaaaccagtgctgaatggcctacagacacttaagagccgctttataacaagggctctaaaaagctgtcaaggaagcccccaggctccaacacattaatgcgtgctaattctttccttggaatcggactcgcgtttttcgtccttcgcgacaatctccggggccacatccggcaagggctccggcgcgtattgcagcgcaatttgcaggacctcgtcaatccatttaaccggtttaatctgaagatcctgcttgatgttgtcaggaatttccttcaagtcgcgaacattctcttcaggaatgatcacagtcttgattccaccccggtgcgcggcgagcaatttctctttgagaccaccgatcgccaatacctggccacgcagggtgatttccccggtcatcgccacatcggcgcgcacgggaatgccggtcaaggccgacacgagggccgtgcacatgcctacgcccgcgctagggccgtctttgggggtcgccccttccggcatgtggatatgggtgtcgtgcttctcgtggaagtccagcgggatgcccaggctgcgggcgcggctgcgtaccacggtctgcgcggcggtaatggattcgaccatcacgtcacccagggagccggtcttgatcaactggcctttgcccggaatcaccgcagcttcgatggtgagcaattcgccacccacctgggtccacgccaggccagtcacctggccgacctggtcctgttgctcggccaggccgtagcggaatttcttcacgcccaggaagtgctccagggagtcggcaaccactttcaccgagaagcgtttttccaacgcgtgttccttcaccgctttgcggcagatcttcgcgatctggcgctcaaggccccgcacaccggcctcgcgagtgtagtagcgcacgatgtcgcggatcgcctcgacctcgaattcgatctcgcccttcttcaggccgttggccgaaatctgcttgggcgccaagtacttgaccgcgatgttgatcttctcgtcttcggtgtagcccggcagacgaatcacctccatccggtccagcaaggctggcggaatgttcatggagttggaggtgcacaggaacattacgtcagacaagtcgtagtcgacttccaggtaatggtcgttgaaattgtggttctgctcagggtccagcacttcgagcaaggccgacgccgggtcgccacgcatgtcgctgcccattttgtcgatttcatcgagcaggaacagcgggttgcgtacacccacttttgtcatcttttgaatcaatcttcccggcatcgaaccgatgtaggtacggcgatgaccgcgaatttccgcctcatcacgcacgccacccaaggccatacgcacgaatttgcggttggtggcggtggcgatcgattccgccagggaggttttacccacacccggaggcccaaccaggcacaacaccggaccgcggattttcttcacgcgtttttgtacagcgaggtactcaaggatgcgctccttgacctcttccaggccgtaatggtcagcgtcgagaatctcttcagcacgggccaggtccagacgcaccttggtctgggccttccacggcacttgcaccagccagtcgatatacgagcgcaccacggtggcttcagccgacatcggcgacatctgcttgagcttgttcagctcggcggtggccttggtcagggcgtctttgggcaggccagcggcatcgatgcgctttttcagctcttcgatttcgttgtggccttcctcgccgtcgccgagttccttctgaatggccttcatctgctcattcaggtagtactcgcgctggctacgctccatctgctttttcacgcgaccacggatgcgtttttcaacctgcaacaggtcgatttcgccatccagcatcgccagtacgtgttcgacacgggccgacaggtcgatgatttcgaggatgtcttgcttctgctcgattttcagcgccatgtgcgcggccatggtgtcgaccaggcggcttggctcatcaatgctgttgagggacgacaggacttcagccgggactttcttgcccaactgcacatactgctcgaactgcgacagcaggctgcgcacgaacacctcggattcacgctccggggcttcgacttcttcgatcagtgccacttccgcgcgcaggtggccgtccacctccataaagcgctctacggcaccgcgctgctcgccttcgaccagcaccttgacggtgccatcgggcagcttgagcaattgcaggacagtggcaatggtgccgacgcgatacagggcatcttcgcccggatcatcatcagcaggattcttctgggccaacagcaggatttgcttgtcgcccgtcatcgcggcctcgagggcttcgatagacttctcgcgccccacgaacagcgggataaccatgtgcggatagacgacgacatcacgcaacggcaggagaggcaattcgatggttgtcttcatgatttcgcctctatgacagttcaaaaataagcttgaaaccaagatgggggttacctgcaaaaaaaacaagctcaatgccagcagttaaacgcatgaataaacgcgaatttaaccaccgtctcgaaaaaacgccccaaaaaacaaggggcccctaaaggccccttgcttgtaccacaactgctgaacgcttacgcgtcgggtgcagccttggcagccggctcactgttttcatagatatacagcggcttggacttgccttcgataacgctttcgtcgatcaccactttactcacctcggactgcgaggggatttcgtacatggtgtcgagcaacacgccttcgaggatagaacgcagaccacgtgcaccggtcttgcgctccagtgcccgcttggccaccgatttcagcgcgtcggtacggaactccaggtctacaccttccatctcgaacaatttgccgtattgcttggtcagggcgtttttcggttcggtgaggatctggatcaaagccgcctcatccaactcgtccaacgtggccaggaccggcagacggccaacgaattccgggatcagaccgaacttgaccaaatcgtcaggctcgacttcacgcagggactcgcccaccttcttgccttcttccttgctacgcacttccgcactgaaaccaatgccgccacgggtggaacgctgctgaatcaccttctcgagacccgagaacgcaccgccacaaatgaacaggatgttgcgcgtatcaacctgaaggaattcctgctgcgggtgcttgcgaccaccttgcggcggtacggacgcaaccgtgccttcgatcagtttcaacagggcctgctgcacgccttcaccggaaacgtcccgggtgatcgacgggttgtccgacttgcgcgaaatcttgtcgatctcgtcgatgtagacaatacccatctgggctttctctacgtcgtagtcgcacttctgcagcagtttctgaatgatgttctcgacatcttcacccacgtagccagcctcggtgagggtggtggcgtcggcgatggtgaacggaacgttcagcaggcgagcgagggtttctgcaagcagggttttacccgagcctgtaggaccgatcagcaagatgttgctcttgcccagttcaacctcgtcacctttcttgtcacgctggttcaggcgcttgtagtggttgtacaccgctacggccagaaccttttttgcacgctcttgaccaatgacgtattggtcaaggatgccgctgatttctttaggcgaaggtaatttatgcgcactgctctcggcctgggcttcctgcacctcctcacggatgatgtcattgcacaggtcgacgcattcgtcgcagataaacaccgaggggccggcaatcaatttgcgtacttcatgctggcttttgccacagaaggagcaatagagcagcttgccgttgtcctcgccgttgcgggtgtcagtcattcgttcgatccaaatccgataggcttgcaacacaagatgaaggcttatgcgggctttttcaagcccgccagtggtcggacatgccgaccagccctattttgagcggcttatattatgcggggcgcttgtcgatcactgcgtcgatcaacccgtattccttggcggcttcagcgctcatgaaattgtcacggttggtatcgcgctcgatttcttccagggtgcgcccgctgtgcttggccatcagcgtgttgagacgctcacgaatgaagaggatttccttggcgtggatttcgatgtccgacgcctggccctggaaaccgcccagtggctggtgaatcatcacgcgcgagttcggcaggcagaaacgcttgccttcggcacccgcggtcagcaggaaggcgcccatgctgcacgcctggccaatacaggtggtcgacacgtttggcttgatgaactgcatggtgtcgtagatcgacatgcccgcagtcaccgaaccacccggcgagttaatgtagagatggatgtccttgtccgggttttccgcttcaaggaacagcagctgcgcacagatcaggttggccatgtagtcctctaccgggccaaccagaaagatcactcgctccttgagcaggcgcgagtagatgtcgtaggcgcgttcgccacgagcggactgctcgacaaccatcgggaccaggccgcctgcggcctggatatcagagttctgctgaatataggaattacggaacatgctctgcagttactcccaaatagtcatgtcttgaaaacgcataagccagcgcgaggctggcttatggttgaatttccaacgagttggacaatcagtcggcttgtgctgcttccgccggtttgactgcttcttcgtaagagaccgctttatcggtcaccttagccttctgcagaacagtatccacaacttgttcttccagcacaaccgaacgtacttcgttcatctgctgctcattcttgtagtaccaagccacgacctgctcaggctcctggtaggccgaagccatttcctggatcatttcgcgaacgcggtcttcgtctggcttgaggtcgaactgcttgaccacttcagccacgatcaggcccagcacaacgcggcgcttggcttgctcttcgaacagctcggccggcagctggtcaggcttgatgttgccaccaaactgctgaaccgcttgaacgcgcaggcgatccacttcgttggacagcagggccttaggcacttcgatcgggttggcggccagcagaccgtccatgacctggttcttgaccttggacttgatggcctggcgcagctcacgctccatgttcttgcgaacttcggtgcggaagccttcgatgccggtttccttgatgccgaactgggcgaagaactcttcgttcagctctggcagcttaggctcggaaacgctgttgacggtcacggtgaactcggcggttttgccagccaggtccaggttctggtagtcagcagggaacgtcaggttcagaacgcgctcttcgccagctttagcgccaaccaggccgtcttcgaaaccagggatcatgcggttggaacccagcaccagctgagtgcccttggcggagccgccagcgaagacttcgccgtcaaccttgccaacgaaatcgatgttcagttggtcttcgttctgggcggcacggtcggccacttcgaaacgagtgttctgcttgcgcaggatttccagcatgttgtccaggtccgaatcagccacttcggcgctcagacgctcgatttcgataccgtcgaaaccggccacttcaaattccgggaacacttcgaatacggcaacgtattccaggtccttgcccgcttccagggacttgggctcgatcgaaggcgagccagccgggttcagcttttgctcgacaacggcttcgtagaaagaagcctggatcacgtcacctacagcttcctggcgcgcatcggcaccaaaacgacgcttgatttcgctcatcggcactttgcctggacggaaaccagcgatcttggccttttgggcagtctgctgcagacgcttgttgaccgcagtctcgatacgctctgccggcacggtgatgctcaggcggcgctcgagagcagtagtattttcaacagaaacttgcatggatattcctcgttgcacagacattagccggccatttccgaccccaatcaagggcatgcattctagtgggtcaaactcaagaagtcaccctactgaaaacacagcggaaaacagccggcaatttatcggtacgaaagcactgaagtacctcgccccggtgacaaatacagccaaattgcgccagggctctgcgccgcccctttctatatatagaaggaacaagcattcatctccctgacgacccgccccgcgaacagagcaggcaagcaaagcggcatcatcgagatacacaaatacgacgacacgccctgccggggcagcccagcacctgcggccacccaatctcaaaccgccaaaaccaaaaaaggcgccagactgttaaatctggcgcctttcgaatatggggtggacgaaggggatcgaaccctcgacaacgggagtcacaatcccgtgctctaccaactgagctacgcccaccatattgcgttaacaaagaaaccaaaccacttctttgttgagccctgcccgcctgacgaccggcaaaagctttaattggtgcggatgaagagactcgaactcttacgcctcgcggcgctggaacctaaatccagtgtgtctaccaattccaccacatccgcgcttgaaactcttaaagcaaaggcgccagactgttaaatctggcgcctttcagaatatggggtggacgaaggggatcgaaccctcgacaacgggagtcacaatcccgtgctctaccaactgagctacgcccaccatatagcgctacttgtgccaaagctgcctaatggcgcacccggcaggactcgaacctgcgaccatccgcttagaaggcggatgctctatccagctgagctacgggcgccttattaatctgtactcttggaggattacaaactaagtgcttccagccttgcagtacaactattctgctcgaccttcttaaccagtgctaggctgtgcccgacaagtgcgacgaatagtatagatgccccggaaacccgtcaaatcttttttgaaaaaaactgattttatttaaggggttagggcaatttgcagaccaagcgcctttgccctcgcgccttggcatgcgagaatgcgcgcacttttcttccccctctcgatggttaatcacgcgtaatgactgcacaacttatcgacggcaaatcaatcgccgccagcctgcgccagcagatcgccaaacgagtcaccgagcgcagccagcaaggcctgcgcacgcctggcctcgcggtgatcctggtcggcagcgatcctgcctctcaggtttatgtctcgcacaagcgtaaagactgtgaagaggtcggctttatttccaaggcctacgacttgccttcggacaccactcaacaggccctgaccgacctgattgacagcctcaacgatgacccggacatggatggcatcctgctgcaactgccactgcctgagcacctggatgcctccaaactgctggagcgcatccgcccggacaaagacgtcgacggtttccacccttataacgtcggccgcctggcccaacgcattcccctgctgcgcccatgcacccccaaaggcatcatgacgctgttggaaagcactggtgtcgacctgtacggcctcgacgccgtcgtggtgggcgcatcgaacatcgtcggtcgcccgatggccatggaactgctgctggccggctgcaccgtgaccgtcacccaccgcttcaccaaggacctggccggccacgtcggccgcgctgacctggtggtagtcgccgccggcaagccgggcctggtcaagggtgagtggatcaaggaaggcgccatcgtcatcgacgtgggcatcaaccgccaggaagacggcaagttggtgggtgacgtggtgtatgaaaccgccctgccccgcgctggctggatcacgccggtgccaggcggtgtcgggccgatgacccgggcgtgcctgttggaaaatacgctgtatgccgcagaaactctgcacggctgataaccaggcatgttgaaaaagccctgctttatcgcagggctttttattgcccgtgaaaaacccttgttgcaggctgttaacgcattaaacaaactagccaaaggccatcacccttccggaattcgaaatgcctggcatcttcccaaagccagccttgcctggcatcgcgctcaggcggtggcgcttgttgcaccgagtcaaacaagcccacgctgcgcagttgttcaacgttacccaatccactatttcgcgctgggaaagcggcgtacaggcaatcgacccctgcgcgcaccaacagcttgagcaattgctcgccgcccgccttgatgcggccgcagatcaagccttggctcgcctggtcagggaaagctcacggcccgttcatctcatgtgcgacctgacccaccgcctgctggcttgctcccctgcccgcgcagcccagttcgcaagccccgtgagcgaattgctggggcgttcgctatggcgctttgcgacaccggagatcatcagcaaggagctctccctggatgaaaccgggtggagggaagtcagtgcgccaccggcgatcgagttcgttaccggccacaatgactcgcttgttgtgcctatcagccagagcgcctgtcggtggacgcgtattcctctttcagacggtacatcggcgcgtttggtggagacgctttgactgccctgcgctgtgcatattgtatgcgtggacgttcagactacccgggcttaatctgactccactagcatagccttcgccactggagacagagaacgtcatgaacatcgacaaaatcaaagggcgcctagaattcctccgcgaaacggaaaaactcaaggatgtactcagaagtgcacacacctcttccgggcgcaccgaaagcacggcggaacacagttggcgtctttgcctgatggccattgttttcgaagatcaactggccgagcccgacatgctgaagatcctcaagatgtgcgtcattcacgatctgggggaggccatcaacggagacatcccagcagtcagccaggcggcgtttcccaataagggcgagcaagagagagacgatcttgtgcttctgacctctgcgctggatgagccgctgaaagctgagatattggcgctctgggatgactatgagcacgcacagtctgcggaggcaagagccgtcaaggcgctggacaagctggaaacgctgctccagcacaatcagggcaagaacccaccgggcttcaattacgagttcaatctagcttacggcaagaagtacaccgatgccgatcccctgtttgagcaacttcgacagcttatcgatgaggacacgcgagaaaaaataacaaagccataggtttaaaatcggcacagcctaaccaatcatcggcttacagcctttatttaaaggctctctatcgctttctgatccatactcctaaaatgtaacgccatttgtcacaaaatccgtttcacaacggcatttccttactttttagcgagttcatccgcgtgaaaattcgtctttctattgtcagcctgttttttgctttggcaggcaccttcgcccacgccgccgaatccaccctggccccgcgtgacgcctccaagcttcaaatcgcctccggcagcgccatgctggtcgatttgcagaccaataaagtcatttattccagcaaccccgacgtggtggtacctatcgcctcggtgagcaagctgatgaccggcctgatcgtcctcgaagccaagcagaatatggacgagtacatcgacatcaacatcaccgacacgcccgagatgaaaggcgtgttctcccgggtgaagatcggcagccagatgccgcgcaaggaaatgctgctgatcgcgctgatgtcttcggaaaaccgcgccgctgcgagcctggcccaccattatcctggcggttacgcagcctttatcgcggcgatgaacgccaaggccaagtccttgggcatgaccagcacccactacgtggagcccaccggcctgtcgatccataacgtgtcgaccgcccgcgacctgagcaagctgctggcctatgcgcgtaaattcccgatgctgagccagctgagcaccaccaaggaaaagaccgtgtcgttccgcaagcccaactacaccttgggcttctccaacaccgaccacctgatcaaccgcgccaactgggatatcaagctgaccaagaccggcttcaccaaccaggccggccactgcctggtgctggtgacgagcatgggcaatcgcccggtgtcgctggtgatcctggatgcctttggcaagttcacccattttgccgatgccagccgtattcgtagctgggtcgagaccggcaaaggcggcgcagtgccggatgtggcgctgcgttacaaggccgataaaaacctcaagaatcgagcgaccgctacggaagtacgtcgataaacagcgattttagtgtgggagcggacttgctcgcgaatgcggtgggtcagcctaagcattcagcgactgacactgcgccttcgcgagcaagcccgctcccacatttgagtttcacttcttctctgccaacaccttgagcgcttgggccgccgcttgctcctgccccgcctgggccgtggcattggccgcatcgcgccagcgctgcgcgtccacattggccggcaactggctcgggcgctgggtcaggatggcccaatggcccgcgcccttccacgccgactcaaagtcgctgaagctcatgctcaagcggcgctcattgcctgagcgcaacagcaccgtactcttctgctggttgaaccccaccaccacgacataacgcgccccggaccaatagctggcgttgatccgcgccatcaccgggtaacccgccgccacctgcgccagcacggcggtcagcttggcctccaatgggtacaccatcagcccgtactcacgcgccagcacctgcatgttgcgctcaaggcccgcctcggcgccgggcaggcgcagcggcttatcaagcaaacccggtgtcatgacaacgccttgttgcgacagcatgctggcaagtgccgtaggaccgctctgataagcctcactgcgaaaggtcggcacgccattgagttcgacgcgctcgggcaagccaggcagtttcgatggagtgttgctggaacaggccgccaacccaagggcaacggccagtagcaaggaagttttaaggttcgaccgtaagcgcaattttttcactctcttgatcaactgccggtaaaggccccgatcatagcccaatcgcgctttctctatcccgtaggagcgagcttgctcgcgaaaaacttacaggcgccgcgtttattcaggaagcctgcgtcatcgttgacgtttttcgcgagcaagctcgctcctacagggggcggcgcaagatatctatagccgacgcgtgcaataaagcggtgacgatagagcaaacaagttggacggactcgaccattggtcaatagcaggcaaccgtcagctgactagactgtccattgagaagactgtgtgtgccccaagtgggcgaaaggaggcccgaatgagccttgcgacaacgattttcctgttgatctgtggttggctggccgtcgccgccgccatgctgtggggggtcatgcgcgtgacgcgccggcatcatcacccccacgtcaaacctgctgaacccgccgagccacgcaagacgacggcgcatcacgcctagccaggcatgcaattgaagtcctgggtcgcggcaatttccttgccgtggccgtcctcaagggacgcgcgcaccgtggtgcccaggctcgactccaccagggtgtagtgctcacccgccttgaaatgcttgtactcgatgcggccctggcagtcctgctggttgtcgtcacccggctcgtcttcaaataaggtcacgtccaggcgatggtcccccggggtcacttcaaaatagcgcccatcgtccacacgtttgccatcgacacgctcggccatcaggtcattcggcgcttcttcctgcaagccgatccaggcttggctggggtccgccttggggatcgggccggcgcatgccgatagaaagcagacaaagccaaggacgggaactaacaacaatggtttaagtgacatgacagggctccaaagggcatgaatgaaaaggtcgtatccgatgactgacaagcttgatcagccgcctctcctggaacaaatgaatccctatgaaaggatcttcagccgttaactaaaacttccttcacctggctgaaaggtgcgtgttaggtgggtcgggcaagactgccggggtttgcaatcctgctcttctcggagactcacgcatgctcgggctggtaaagaccgcactgcacaagccgtacaccttcatcgtgctggctatattcatctgcatcatcgggccgatggcggccctgcgcacgcccacggatgtttttcccgatatcggcattcccgtggtcgccgtggtctggcagtacaacggcctgtccccggacgccatggccggccgggtgatctacacctacgaacgctccctgagcaccaccgtcaacgacatcgaacacatcgagtcgcaatcgttgcccggcatgggcatcgtcaagatcttcttccagcctggcgtggacatccgtaccgccaatgcccaggtcacggcggtgtcacaaaccgtgctcaagcaaatgccaccgggcatcaccccgccgctgatcctcaactacagcgcctccacggtgccgatcctgcaaatggcgttctccagccccagcctttcggaagccaaaattcgtgacctggtgcagaacaatatccgcctgcccttgagcgccctgcccggcctggccatgcccacgccgatgggcggcaagcagcggcagattacgctcgacctcgacccccaagccctcgccgccaaaggcttgtcggcccaggatgtgggcaatgccctggcgctgcagaaccagatcattccggtgggcaccgccaagctggggcccaacgaatacacgatcctgctcaacaacagccccaaggccattgatgagctcaacgacttgccgatcaagaccgtcgacggggcgctgatcaccatcggccaagtggcccacgtgcgcgacggttcaccgccgcaaaccaacatcgtgcgggtcgacggccatcgcgccgtgctcatgccggcgctgaaaaacggcagcatttccacgctgtcgatcatcgacggtatccgccagatgctgccgcgcatcaacgaaaccctgccgccgtcattgaaaacctcgctgctgggcgatgcctcggtgttcgtcaaacagtcggtgggcagcgtggcccaggaaggcatcattgccgccctgctcaccagtgcaatgatcctgttgtttcttggcagttggcgctcgaccttgatcatcgccgcctcgattcccctggcggtgctttcggccatcgcgctgttggccgtcagcgggcaaaccctcaacgtcatgacgctgggcgggctggcgttggccgtgggcatccttgtggatgacgccacggtgaccatcgaaaacatcaactggcacctggagcaaggtaagacggtgaagaccgcgattctcgacggcgccgcgcaaatcgtcggcccggcgttcgtctcactgctgtgcatctgcatcgtgttcgtgccgatgtttttgctgcaaggcattgccggttacctgttccggccgatggcattggcggtgatcttcgccatggccagttcgttcattctctcgcgcaccctggtgccgacgctggcgatgtttttgctcaaaccacatcggccggagtcaggcgctgggcatcatccggaagatgcattcatcaaccaccacgagggcgaacagcacctgaaaccacgtaatgcattgctgcaatcggtgctgaattttcaacagggattcgagcggcacttttccaatgtccgcgacacctaccatggcctgctgacgctggcactgggcgcacgcaagcgcttcattgtcgggttcctggcctgcgtactcgcgtcgttcctgttgttgccgagcctgggccaggacttttttccggccaccgatgcgggtgccttggccctgcatgtgcgcttgcccctgggcacgcgcatcgaggaaagcgccgcggcgttcgaccgcatcgaagcgcggatccgcgaggtcatcccggccgaagaactggacaccatcgtcgacaatatcggcatcccgctcagcggcatcgacatggcctacagcagcagcggcaccatcggcccgcaggatggcgatattcaagtcagcttgaaaacgcaccacgcgcccaccgccgactatgtgaaaaaactgcgcgaagccctgccgcaaagtttccccggcagccactttgcgttcctgcccgccgacatcagcagccagatcctcaacttcggcgcccccgccccgctggacgtcaaaatctccgggcgcaatgacgcagaaaaccgcgcttatgccgtcgaacttgaacggcgcttgcagcatgtaccggggattgccgacctgcgtatccagcagtccaccggctacccctcgctgcaagtaaacgtggaccgtatgcgcgccaacggcctgggcattaccgagcgtgatgtcaccaacagcatggtcgcctccctcgccggcagctcgcaaaccgcgccgaccttctggctcaacccggccaacggcgtgtcttattccatcgtcgctgccaccccgcaataccgcctcgacagcttgccgtccctggaagcgctgccggtgacgggggcaaacgggcaggcgcaaatcctcggcggcgtggcaaccatctcccgggtacaaagcccggccgtggtgacccactacaacatcgaaccgaccctggacctgtacgctaacgtgcaaggccgcgacctcggcggtgtggcccgcgatgtgcaaaaagtgctggatgacacggcgtccatgcgtcccaaaggcgcgaccatcagcctgcacgggcagatcgatgcgctgcatgaggcgttcagtggtttgagcttcgggctgctcggcgcggtggtgctgatctacttgctgatcgtggtcaacttccagtcatgggccgacccctttgtgatcatcacggcgttgccggcagcattggcgggcatcgtgtggatgctgttcctcagtggcacctcgttgtcggtgccagcactcaccggcgccatcttgtgcatgggcgtggccaccgccaactcgatcctggtggtgagcttctgccgtgagcgcctggccgaacatggcgatgcgttgaaagccgcgctggaagcgggctacacacgctttcgcccggtgtgcatgaccgccctggcgatgatcatcggcatgctgcccctggcgatttccgaggagcagaacgccccgctcggccgggcagtcatcggcggcttgatcttcgccaccatcgccactttgttgtttgttcccgtggtcttcagcctggtccacggccgtcatcctactcgcgcaactgctggagaaacgccccatgtcgcctgatcaaaaaccctcgcgcaagcgcctgatgctcctgggtgtcggtggcctgacgttggctgccctgttggtcgccagcggcctgcacgcacgaacgctgcacgagcaatcggtcactgcctggaccgaagccgccgccgtcccccaggtgatggtgttccaacccaagccaaacgccggcggtgacaccctacgcctacccgctcacctggaggcgtggagcaaggcggcgatccatgcgcgggtcagcggctacttgaaggactggaaagtcgacatcggcgcccaggtcaaggccgggcaaatcctcgccgaaatcgacagccccgaccttgaccaacaactggcccaggcccatgcgcgcctgatccagcaacaagccaatgcacacctggcagccaccacggcgacccgctggcaaaacctgctggccagccattcggtatcgcgccaggacgccgatgaaaaaacctccaacgccgcagccgccaaggccaacaccgaagccgctgcagcagactatgcgcgactgtgcgccctggaaagctacaagacccttcgcgcgccgttcgccggcaccatcaccgcccgtaacaccgacatcggccagttgatcaaggccgataacgccagcgatccggaactgttcaacattgccgacacccaccaattgcgcttgtatgtgccggtgccgcagaactatgcagcggtcatccatacaggccttgaggccgaactgaccgtccccgagcaccccggcgagcacttcaaggcacgtctgatcggtgactccaccgccatcgaccgccgctccggcaccctgctcgctcagttcgtcgccgacaaccccaacggcgaactgctgccgggcgattacgccgaagtcaccctgccgattccggctgacacccatggcgtgagcatcccggccagcgccttgatcttccgcgcccagggcacccaggttgcgatactggacggtcgcaaccatgtgcacctgcaagacattcatattggcctggacctcggcgagcgcctggtgatcgaccagggcctgaagcctgctgaccgtatcatcgacaacccgcccgacgccctgcgcgaaggcgacccggtgcaactggccgacgcctcgggaggtgcccatgcgcccaaagcttaagccgctggcggcgttggtgctgctggcgttgcagggttgctcgatggcacccagctataaagtgccgtcgattgacctgcccgcgaactaccgtgaacaaaccagcgatggcccttggcacagtgcgcaaccgtcggaccaattggcgccccagtggtggcagctttaccacgattcgcgcctgaacgcgctgcaacagcaactgctcaaggccaacccggacctggccgcggcgctcgcgcacttcgatgcgtcccaggcctacgccagccaattgtacgcgggccttttcccgcaaatcaccgccagcgcgcaaccgcagcgacagcgtcaatcggattcacgaccgttacgcggcactacacagccgtcggtgtacaacagcaataccgctgggttctccctgggatacgacctcgacctgtggggcagaatccgcaatcaggtcgccgcgggcgatgcccaggcacaagcgtcctttgatgatttggcggtggtgcgcttgagcctccaacagcagttggcgagcctgtatgtgcagctcaatgggctggatgcacaaagcaggatactcaacagttcactggaggaattcagccaggcgctgcaactgacccgcagccgttatgaaggccagattgcgtcggaactggacctgacccgcgcgcaaaaccaactggccgaagccaaggcacagttggacgaagtgcgtggccagcgcaacctcgtcgagcatgccatcggtgcattggtgggcgtaacggccagtgatttttcactgccgtccagttcgcaattaatggcgttgccaggcattccggcgcagttgcccagccacctgctgcagcgtcgcccggacattgccgccgctgagcgtcgcgtgtttgcagccaacgcgactatcggcgtggccaaggcagcctggtttccggatttcagtttgaccggtgtgctgggcgggcagacccaaggcgtcggcaacctgctgtccgccggcaaccggtactgggcgctggggccgctgatgaacctgccgatcttcgacggcgggcgcttgagcgccaacgagcgccaggccaaggccgagttcgaggaggcctcggcacagtaccgtagccacgtcttgaaagccgtgcgtgaggtggaggataacctcgcacaactgcgagatctgcagcagcaagccgaggacgagcaagcggcggcagaggcggcgcaacatacccaggctttggcgatgaatagctatcaggccggggcggtgagttacctggacgtggtcaccgcccaaaccgccgcgttgcaggcacagcgaacgttgcaggcggtgcagacccggcaattgcaggcaagcgtgggactcttgaccgcactcggcggcggctggcagccgggctaatagcctgctgactactgatcgttcccacgctctgcgtgggaacgccgttcaggacgctctgcgtctgcccttaaaatcgtgacgcggagcgtcacagggttcattcccacgcggagcgtgggaacgatcaggccgcgagtttgccgctggcgatggccgctgaagcggctagcatggcgcgcaacaacaccgcacaccctgccgccaaatcatccggcgcggcattttcgatttcgttgtggctgatgccgccttcacacggcacaaagatcatccccgccgggcccagttcagccacgaagatcgcgtcgtgccctgccccgctgacgatgtccaggttcgacaagcccaagccattggcggcatcgcgcactgcatccacacagcctttgtcaaagtacagcggcgggaagtccgccgtgggctgcaggtcgaaactcaagccatgtttggcgcaggtgtcctcgatcacctggcgcacctgggcaatcatcgagtccagccgtgccggttccaggtgacgaaaatccagggtcatgcgtacttcaccgggaatcacgttgcgcgatcccggatacgcttgcaggcaacccaccgtgccgcacgcatggggctggtgcgccaacgccgccgcgttcacggcggccaccaccgccgccgcacctaccaaggcgtccttgcgcaagtgcatgggtgtagggcccgcatgggcctcaacaccgcgcagcttcaggtcgaaccatttttgcccaagggcgccgagcaccacgccgatggttttgtgttcatcctccagaatcggcccttgttcgatatgcgcctcgaaatacgcgccgaccttatgcccgctgaccggccgtgttcccgcataaccaatcgcattcagcgcctcacccacgctgaccccatcggcatccactttggccagggtatcggccagggtgaacttctcggcaaacacccctgagcccatcatgcacggcgggaagcgcgagccttcttcgttggtccataccaccacttccagcggcgcctcggtttccaccttgaggtcgttaagggtgcgcagcacttccacaccggccagcacgccgaagcaaccgtcgaacttgccgcccgtgggctgggtgtcgatatggctgccggtcatcactggcggcaggtcgggattgcggccggggcgacgcgcaaagatattgccgatgccgtcgatggtcaccgtgcaaccagccgcttcgcaccactgcacgaagagatcgcgagccttgcggtcgaggtcggtgagggccaggcggcacacaccgcccttgggggtggcaccgagtttggccaggtccatcagcgactgccacagacggtcgcggttgatgtgctgatgggtcgattgcagaacgtcgagggcagcgttcatgggggtctcctcaggctacaggttcttatgaattaacgcggtcaactgtgggagctggcctgactgcgatagcggtgtgtcaggcgacacggctttaactgatagtccgctatcgcaggcaagccagctcccacctgaaccatgtttacaacggggatttggcggtgagtggactgctagcgcgcttggcattgagcccgtaatacaacaccccgcccaacgccgagccggtgaaccagccgtagctgtagaaccagctgaacgcatcgctgcccagcgacagcagcgtcagcaccaccggtacgccaaaggcgataaagccgctccagttccaggccgggtacacgtcatcgcggtacaggccggccaggtccagctgctgttttcgagtaatgaagtagtccaccaccatgatcccggcaatcggccccagcaggctcgaataacccagcagccaattggaatacacggtttcaagactcacgtccgagacgatcagcccgagttttttcagcagttcatgggccatcagtgccagccctaccaggccagtgaggatcaccgccgtggtgcggttgatcagcttgggggcgatgttctggaagtcgttggtgggcgagacgatgttcgccgcggtgttggtggacaaggtcgcgacgatgatcagcgccatggcgatggccacccacaccgggctctggatatgaccgattaggctcaccgggtcggagacgctgacccccaccagtttcaccgaggcggcggtcatgaccacgccgagggcggcgaacaggaacatggtcagcggcaagccgaagatctgccccagaatctggtctttctggctgttggcgtagcggctgaagtcgggaatgttcagcgacaacgtggcccagaaacccaccatcgccgtaagccccgccataaagtaaccggtgaggcttgcgccttcggggcgcttgggtgggatcgccatcagctcgctgagggacacattcggcatcgcccataccagcaggccaactcccacggcgaccaacagcggcgccgacaaggtttccaggcgcttgatcgactcggcgccgcgcagcaccacccataggttcaggcaccagaacagcatgaaaccgatcacctcaccggtaccgccgagggctttccagccgtcgaaaatcgagcctaaaaacaggtgaatcgccagcccgccgaacatggtctggataccaaaccagccgcaggccaccagcgcgcggatcaggcacggtacgttggaaccgaggatgccaaaggacgaacgcaacagcaccggaaacggaatgccgtacttggtgccgggaaacgcgttgagggtcagcgggatcaacaccacgatattggccagcaggatcgctaccagcgcctcccctaccgacagcccgaaatacgcagtgagcaccccgcccagggtgtaggtgggcacgcagatcgacataccgacccatagcgccgtgatgtgccatttgttccaggtgcgctcgtgcactttggtaggtgccatgtcgtggttgtagcgagggctgtcgaggacgtcggggccggcgtcgagttcgtacaggccgttgcgctcgatgacttgcgatctgttctgttgcatggccgctccacggtttttttaaaattattgttgctcacctgcacgctaggttcaggtggccggagtaccgcatcgacaacatgacatccagggttccggccaactgcccgtgcactcaataaccgtgccgacaaccgcctctgagcccgtaccgcttatataacgtactgatgtttatcagctttccaattgagcctgcggtacttgccgtatgcgtcaggctaaacaactcacaagttgctcgaaccttcaggtctcaatctggtgcatcacaattatttttatttctcgacgccgtcaagcggcatatctcaagcgcctgatttgcaataagaaatattgatcagatcaagaacctgtcaagtgcgtcaaaacagggtgggcgtgcttcattttggtgaaaacagtattttcctatgtatatcaataagataaaaactataaagacttgcgaaaaatcttcttgctcattcgaaaaactcgggctagtttctattcctgtcaccaatgacaggaattaacccgtcatcggtacgcagtattacaacacttagaactggcacaagccggtcaagcctgtgaggaactcgacatgtcgctgttgatccgtggcgccaccgttattacccatgatgaaagttaccgcgccgatgtgttatgcgcagagggtctacttcgcgccattggcacgaatctggatattcccgcaggctgcgaagtactcgatggcagcggccaatacttgatgccgggcggcatcgacccccatacccatatgcaattgcccttcatgggcaccgtggccagtgaagactttttcagtggtacggcggcaggcttggccggtggtaccacctcgatcatcgacttcgtgattcccaacccgcagcaatcgctgatggaagctttccaccagtggcgcggctgggccgaaaagtctgccgccgactacgggtttcatgtagcaatcacctggtggagcgagcaggttcgcgaggaaatggccgagttggtcagccatcacggcatcaacagcttcaagcatttcatggcctacaagaacgcgatcatggcggccgacgacaccttggttgccagtttcgaacgctgcctggaactcggcgcggtgcccaccgtgcatgccgaaaacggcgaactggtgtatcacctgcaacgcaaactgatggcccagggcatcaccgggccggaagcccatccgctgtcgcgcccctctcaagtggaaggcgaagcggccagccgtgccatccggattgccgaaaccatcggcacgccgctgtacctggtgcatgtgtcgacgaaggaagccctggatgaaatcacctatgcccgaggcaagggccaggcggtgtacggtgaagtgctcgccggccacctgttgctcgatgacagtgtgtaccagcaccccgactggcagaccgccgccggctatgtgatgagcccgccgttccgcccgcgcgggcaccaagaggcactgtggcatggcctgcaagcgggcaacctgcacaccaccgccaccgaccattgctgcttctgcgccgagcaaaaagccgccgggcgtgatgacttcagcaagatccccaacggcaccgccggcattgaagaccgcatggcgctgctgtggcacgaaggcgtcaataccgggcgtttgtcgatgcaggaatttgtcgcgctgacctccaccaacaccgcgaagatcttcaacctctatccccgcaaaggcgcgatacgtgtgggcgccgatgccgacctggtgctatgggaccccgagggcacgcggaccatttcggccaagacccaccatcagcaggtggacttcaacatcttcgaaggcaagaccgtacgcggcgtgcccagccataccatcagccagggcaagctggtgtgggccgatggcgacctgcgcgccgagcgaggggccggacggtatgtggagcggccggcgtatccgtcggtgttcgagcagttgagcaagcgggcagcgctttgcaagccagtggctgtgaaccgctgagtccaaaaaaagcggacgcggagcgtccagtgaggcattcccacgcagagcgtgggaacgatcgcccacctcaataaccgtgaggccaacaccgtgatccagaccctgacccacctcccccacccccgcgaagacggggccaccctcgccagccagttcaccgacctggcaccgcccctcaacgcccgccaggcccagcttgaagcctcgcgctgcctgtactgctacgacgcgccttgtgtgaatgcgtgccccagcgagatcgacattccgtcgttcatccgcaacatccacaccgacaacgtgcaaggcgccgcgcagaagatcctctcggccaacatcctcggtggcagttgcgcgcgggtgtgcccgacggaaatcctttgccagcaagcgtgcgtgcgcaataacgccgaagaatgcgcccctgtgctgatcggcctgttgcaacgctacgccatcgacaacgcgcacttcagcgaacacccgttccaacgcgccgcgcccaccggcaagcgcatcgccgtggtcggtgccgggccagccggtttggcctgcgcccaccgcgctgccttgcacggtcatgacgtggtgattttcgaagcgcgggaaaaagccggcggcctgaatgaatacggaatcgccaaatacaaactggtggacgacttcgctcaaagggaactggatttcctcctgcagattggcggcatcgagattcgccacggccagcgcctgggcgacaacctgaccttgagcgaactgcaccagcagttcgattcggtgttcctcggcctggggctcgctgccagcaaacagctgggtctgccttttgaggacgcccccggcctgctcgccgccaccgactatatccgcgaactgcgccaggccgacgacctcacccaactgcccctggccgaccgttgcattgtgctcggcgccggcaacaccgccatcgacatggccgtgcagatggcccgcctcggtgcccgcgatgtcaacctagtgtaccgccgtggcctggccgacatgggcgcgacccaccacgaacaggacatcgccaaggccaatcaggtacggctgttgacctgggcccaacccgacgaagttctgctcgacgaccaaggccgcgtgcgcggcatgcgctttgcccgcacccgcctggaaaacggtcgcctgctgccgaccggggaaaccttcgaactggccgccgatgcgatcttcaaggcgatcgggcaaggcttcgacaacgacgccctgcacgatccgctggcccagcaactgcaccgcgtcggcgagcgcatcttcgtcgatgagcaactgcgcaccagcattccaggggtgtatgccggcggcgactgcgtcagcctcggccaggacctcaccgtccaggcagtacaacatggcaagcgggctgccgaagccatgcacgcccaactcatgctgactgtggaggctgcgtaatggccgatctctcgattgtattcgccggaatcaaagcgcccaatccattctggctggcctccgcgccgcccaccgacaaagcctacaatgtggtgcgcgccttcgaggccggctggggtggcgtggtgtggaaaaccctgggggaagatccggcggcggtgaacgtgtcgtcgcgctactccgcgcactatggcgccaaccgtgaagtgctgggcatcaacaatatcgaactgatcaccgaccgttccctggagatcaacctgcgggaaatcacccaggtgaaaaaggactggccggaccgcgcgctgatcgtctcgctgatggtgccttgtgtcgaagcgtcctggaagaacatcctgcccttggtggaggcgaccggctgcgacggcatcgagctgaacttcggctgcccccacggcatgcccgaacggggcatgggcgccgccgtcggccaggtgccggagtacgtggagcaagtgacgcgctggtgcaagacgtattgttcgctgccggtgatcgtcaagctcacgccgaacatcaccgacatccgcgtggcggcgcgggcggcctatcgcggtggcgcggatgcggtgtcgctgatcaacaccatcaactccatcaccagcgtggacctggaacgtatggtcgcgctgccggtggtcggcacccagagcacccacggcggttactgcggctcggcggtcaagccgattgcgttgaacatggtcgccgaaatcgcccgcgacccacagacccacggcctgccgatctgcggcatcggcggtatcggcacctggcgggatgcggcggagtttgtcgccctgggctgcggcgcggtacaggtgtgcacggcggcgatgctgcatgggtttcgcatcgttgaagagatgaaggacggcttgtcgcgctggatggacagccagggccatgccaacctgcaggcgttttccgggcgggcggtgggcaataccacagactggaagtacctggacatcaactaccaggtcatcgccaagatagaccaagaggcgtgcattggctgtgggcgttgccatattgcctgcgaggacacctcgcaccaggccattgccagcttgaagcaggccgatggcacgcatctgtatgaggtgatcgatgatgaatgcgtgggctgcaacctgtgccagatcacttgcccggtggccgactgcatcgagatggtgccgatcgataccggcaagccgtttttgaactggacgcaggacccgcgcaatccttaccgggaagcggtgtaatccttgcccctcgttcccacgctccgcgtgggaacgcatcctgtgacgctccgcgtcaccctggcaagagcggacgcagagcgtccagggcggcattcccacgcggagcgtgggaacgatcagctcaaggttccaagccaatcccgcgcaaaatcacactggtcactgtctgaatggccttctcgaactgcctgtccgacaacggctggtgatcattcaaaatcttcacctggtggtcgaagtcggcatagtgctgggtcgaggcccagatcatgtacaacaggctcgagggctccaccggcaggatgcgtttgtcttgcacccattggcgaatcttcgcttccttcatcttggcccagtcgtacaggctttcatccagggcctcgccgagtgtgggcgcgccgtggatgatttcattggcccagaccttggagccatacgggcgcgtgcgcgagcgctgcatcttggcgcggatgtagctgctgagcaccacacgagggtcgtcaaaggtttcaaagctcagggcgtcctgcttccacaactccagcaggtcgaacagcaccgcgctgtacagctcgcttttggtggtgaagtagtaatgcaggttggagcgcggcagttgcgcttcttcggcgatgtcggccatggcggtgctgccatagcccttgttggcgaagaccttctccgccgccagcaggattttctcgacgttgacccgacgaattccgatcttgtgattgcccataagggctccctgacaacaaaacggcctaaagactaccaccggctctagatcggggcgacaggccaagccgaaacttcgtacactgccgactcctatcctctgatcggtgttgaacaatgttgctcaagaagtccctgaccgctgctgtcctgttcactgccctgctgggcgcctccacggcgtttgcccacgcccacctcgagagcgcggagcctgcggctgacagcaaagtcgccgcacccaaagacctgcgcctgaccttcagcgaaggcgtcgaagccaccttcaccaaggtgtccctgagcaaggacggcaccgaaattgcgatcaagggcctggaaactccgggcgccgacaagaagaccctggtggtcacgcctgccgctgcgctggcaaacggcacctataaagtcgaatggcatgcagtgtccgtcgacactcacaaaagcgaaggcacttacagtttcaaggtcggccaataacccatggcaaccctgctggtgctgtgccgcttcctgcatttcatcgtcgtgctgttgatgttcggggcctgggggttgaggccctggctgctcggcgctgatgtgcaaccgacactggaccggcaactgctgcgcatcacccgtggcctggctgggttggggctcgtcaccggtgttgcgtggttgctgttgatcaccgccagcatggccggcagttgggacgcggcgctgcaaccggccaccctccagttggtgctgggcaagaccttttttggtcaggtatgggcctggcatctgctgctgaacctgctgctggtgatcgtgctgatcaagccctggccggccttgcgcttgccgctgctcgccctgctgctggcaaccctggcacccgtaggtcacggcgccatgctcgacgggctgagtggacagttgctgattctcaaccaggtggtgcacctgctgtgcgttggggcctggctcggggggttgctggtgttggtgctgatcctccagcaggcgcaaggccagcgcctggagccgattttgcgtcgcttcagtggtgtgggatatggcctggtcggcggcttgctggtaaccgggctgatcaacgtgcgcgtgctcaccgggcaactatggcccaccccgctcttccaagggtttgccttgattttgctgatcaaggtggggctggtgctgggtatgctggggttggcgttgttgaaccggttgcgtatcgagcgctgcgagcaacgcctgggcagtttgaaagccagtgtgatgatggagtggctgctgggccttgcagcggtggcggcggtttccctgcttggaacgttaccgccgatggtgatggctgactgaaacctgcgtcgcaatgcaatccatgtaggagcgagcttgctcgcgaaaaactcacaggcgccgcgttcattcaggaagcnnnnnnnnnnnnnnnnnnnnnnnnnnnnnnnnnnnnnnnnttcaggaagcacgcgttatcgttgacgtttttcgcgagcaagctcgctcctacagagggcaaccgtgccgctgcgttgaatcgtttcacccaagtcatcatataacttctgcttgacacgccccgaaaacctcgcaaatatcgcgctcaatgttgtacgacgacgtataacaaataataaaaacaacaaaacaaagggagcctcactgtgagtcaatccgcccgccattcctgcacgcgcctgggccttctcggtctcggcagcctggccgtcaccctgccgctgggtgcccatgccgaaggctttatcgacgacgccaaggccacgctcaatctgcgtaacgcctacttcaaccgcaacttcaccaacccgaccaacccccagggcaaggccgaagagtggacgcagaattttatcctcgatgccaagtccggctttactcagggcacggtcggcttcgggatagacgtgttgggcctgtattcgcaaaagctcgatggcggcaaaggcaccgccggcacgcaactgctaccggtacatgacgatggccgccccgccgacaatttcgggcgcctgggtgtcgcactgaaaaccaggctgtcgaaaaccgagttgaaggttggcgaatggatgccggtgctgccaatcctgcgttccgacgatggccgttctctgccccagacctttcgtggcggacaaatcacctccaatgagattgccgggctaaccctctatggcggtcagtttcgcggcaacagcccgcgcaacgacgcgagcatggaagacatgttcatgaacggcaaagccgcgttcacctcggaccgtttcaacttcggcggcggcgaatacaccttcaatgacaaacgtacccaggtcggcctgtggtacgccgaactgactgatatctaccagcagcagtacctcaacctcacccacagccagccggtgggcgactggaccttgggggccaacctcggcttcttcaacggcaaggaagacggcagcgccctggccggcgacctcgataacaaaaccctgttcgccctgctctcagccaaatacaacggccacaccttctacgtcggcctgcaaaaactcagcggcgacagcgcctggatgcgcatcaacggcaccagcggcggcaccctggccaacgacagctacaacgccagctacgacaacgccaaggaaaagtcctggcaggtgcgccatgactttaactttgtggtgctcggggttccggggctgaccctgatgaaccgttatatcagcggcagcaacgtacacactggggcgatcaccgacggcaaagagtgggggcgtgagtcggagctggcctacacggtgcagagcggtgcgctgaagaacctgaatgtaaagtggcgcaactcaaccatgcgccgggacttcagcaataacgagttcgatgagaatcggatttttatcagttatccgatttcattgttgtaggttccagtgtcgaactcgatctcaaaggtgccgcacatccatgtgggagctggcttgcctgcgatggcggtgggtcagttaccacacccttttctgacccaccgctatcgcagccaagccagctcccacatttgatctcatgcgccgggaaggaagttgacaacaccaggaatccctaacactatttccccatagtcatacgacaacctacaacaaaaatctggaaggcccatgaccaccaccactcccactcccttcaaccgcctgctgcttaccggtgccgccggtggcctgggcaaagtcctgcgtgaacgcatgcgtccttatgcccaggtgctgcgcctttcggatatcgctgaaatggcccccgccaccgatgctcgcgaagaagtgcaaacctgcgacctggccgacaaacacgccgtgcatcagctggtagagggcgtcgacgccatcctgcactttggcggtgtgtcggtggagcgctcgttcgaagaggtgctgggcgcgaacatcagtggcattttccatatctacgaagccgcccgccgccacggggtcaagcgggtgatcttcgccagttccaaccacgtgatcggtttctacaaacagggcgagcaactcgacgcccactccccgcgccgcccggacagttactacggcctgtccaaatcctacggcgaagacatggccagtttctacttcgaccggtatggcatacagaccgtgagcatccgtatcggctcctcgttcccgcaaccgcagaaccgccggatgatgcacacctggctgagtttcgacgacttgacccaactgctcgaacgcgcgctgtacacgcccaacgtcggccataccgtggtgtacggcatgtcggccaacctcgatacctggtgggacaaccgctacgccgcgcacctgggctttgcgcccaaggacagctccgaagtgttccgcgccgaggttgaagcccaaccgcccgtggccgccgatgacccggccaaggtctaccagggcggtgcgttctgcgcggcggggccgttcggtgactgagtgcccagcaacccaagggaatgaccatgtgtgctgaattgattgtcgacgcccgtaacgccgtgggcgaatgcccggtgtgggtgcctgaagaaaacgcgctgtattgggtggatatccccaacggcggcctgcaacgctggaacgccgccaccggccatctggcagcgtggaaagccccagagatgctcgcctgtattgcgcgcacccaagcgggcaattgggtcgcggggatgcaaaccggcttctttcaactcacggcccacaacgacggcagcctcgacaccgtgccgctggccagcatcgagcattcacgcccggacatgcgtttgaacgatggccgctgcgatcgccagggccgtttctgggccggcagcatggtgctggacatgggcttgaacgccgccgagggcgtcctttatcgctatgcgtccgggactgcgccccacgcgcaactgggcgggttcatcaccctcaacggcctggccttcagccccgatggccgcacgatgtacgcctccgattcacacccgcgggtgcaacaggtctgggcgttcgactacgacatcgagaccggtacaccgtccaatcgccgcctgttcattgatatgaacgactttcctgggcgtcccgacggtgcggccgtggacgccgagggcggctactggatctgcgccaacgacgccgggctgatccaccgtttcacccccgacggtcgcctggaccgctccctgagcgtgccggtgaaaaaacccaccatgtgcgccttcggtggcagccgcctggacactctgtacgtcacttccatccgtgacgacccgagtgaacagtcgctgtccggtggcgtgttcgccctcaaccccggcgtccaagggctgcccgaaccccgcttcatcgtttaatcgctgtgccttgaatacaacaataacaagacaggagtgacttccatggacttcaaacgcaccttgctcgccgctgcaatcttcaccctcagcagcgccgcccacgcgctggaaatcaagtttgccgacatccaccccgccggctaccccaccgtggtcgccgaagagaatatgggcaaggccctgaccaaggcgagcaacggcgagctgaccttcaagtacttccccggcggtgtgctgggctccgagaaggaagtggtcgaacaggcccaggtcggcgccgtgcagatgacccgcgtcagcctcggtatcgtcggcccggtggtgcccgacgtgaacgtgttcaacctgccgttcgtgttccgcgaccaggcgcatatgcgcaaggtcatcgatggcgagatcggcgacgagatcctcgccaagatcaccaactccgagttcggcctggtggccctggcctggatggatggcggcacgcgcaacctctacaccaagaaaccggtgcgcaagatcgaagacctcaagggcatgaagatccgcgtgcaaggcaacccgattttcatcgaagccttcaacgccatgggcgccaatggcatcgccatggacaccggcgagatcttcagcgccctgcagaccggggttatcgacggcgcggaaaacaacccgccgaccttgctggaacacaaccatttccagaacgccaagtactacaccctcaccgaacacctgatcctgcccgaacccatcgtgatgtcgaaaatcacctggaacaagctcgaccccgcccagcaggacatggtcaaggccgccgccaaggccgcccaggccgatgagcgcgtgctctgggacgccaagtccgccagcagtgaagagaaactcaagaaggccggcgtggagttcatcactgtcgataaaaagcccttctatgaggccaccgccgcggtgcgtgccaagtacggtgcgccgtatgcggacatgatcaagcgcatcgacgcggttcaataacctcccctgccctgcataaggcccggcgcggtcggtatcgacgcgcccggtcacggtgaacgccatgaagactttactgctgcgcttcaatgaccgcctctacatgacctgcatctgggtcgccggcctgtcggtattgggggtcgccttgatcattccctggggtatcttcacccgctacgccctcggcaccggttccagctggccggagcccaccgctatcctgctgatgctggtgttcacctttatcggcgctgctgccagttaccgtgccggtgcgcacatgtcggtggcgatggttactgaccgcttgccgccaacccaacgccgcctcgtcggcatcctctcgcaactgctgatgggcaccatctgcgtgttcatgacgatttggggcaccaagctgtgcctgtccacctggaaccagttcatgagcgccatcccttccctgcgcgtgggcattacctatatgccgatcccgattggcggggtgctgaccctggtgttcgtggtcgaaaagctgctgctcggtgaccagagcaatcgcaaggtggtgcgtttcgacctggttgaagaaaacgaaggggccgcctgatatggacgcgttgattctgttgggtagctttgttgcgttgatcctgatcggcatgccggtggcctatgcgttggggctgtcggcgttgattggtgcgtggtggatcgacatcccgttccaggccctgatgattcagattgccggtggggtgaacaagttttcgctgatggcgattccgttcttcgtactggccggggcgatcatggccgagggcggcatgtcacggcgcctggtggcctttgccggggtgctggtgggctttgtacgcggtggcttatccttggtcaacatcatggcctcgacgtttttcggcgcgatttccggttcatccgtggccgataccgcgtcggtcggctcggtgctgattccagagatggaacggcgtggttatccgcgcgaattcgccaccgcagtgaccgtcagcggttcggtgcaggcgctgttgacgccacccagccataactcggtgctgtactccctggccgctggcggcacggtttccatcgcctcgctgttcatggccggtgtggtgccaggcctgttgatgagcgcgtgcctgatggtgctgtgcctgatcttcgcgaaaaaacgcgactaccccaaaggcgaagtcatccccttgaagcaggcgctgaagatcgccgccgatgcgctctggggcctgatggccatggtgatcatcctgggcggcatcctgtcgggcatcttcaccgccaccgagtcggcggcgattgcggtgttgtgggcgttcttcgtgaccatgttcatctaccgcgactacaaatggcgcgaactccccaagctgatgcatcgcacggtgcgcaccatttccatcgtgatgatcctgatcgccttcgccgccagcttcggctacatcatgaccctgatgcagatcccggcgaagatcaccacgctgttcctgaccctgtcggataaccgctacgtgatcctgatgtgcatcaacgtcatgctgttgttgctgggcacggtgatggacatggcgccgctgattctgatcctcacgcctattctgatgccggtgatcctgggcatcggcgtcgacccggtacacttcgggatgatcatgctggtgaacctgggcatcggcctgattaccccgccggtgggcgcggtgctgttcgtcggggcggcggtgggcaagaccagcattgaaaaaaccgtgaaggcactgctgccgttttatgcggtgttgtttttggtgctgattgcggtgacctacatcccggcgttgtcgctgtggttgccccatttggtgctgtaaaccttctttcagaaacaaggtgagcaactgtgggagctggcttgcctgcgatagcggtgtatcagtcacggatgcattgactgacaggtcgctatcgcaggcnnnnnnnnnnnnnnnnnnnnnnnnnnnnnnnnnnnnnnnnagttaccgagaatatcgactgacaggtcgctatcgcaggcaagccagctcccacacttgcatcctcagtgtttgttttgacttcatcaggcaggtcaatcgtgattgagctttcggataaattcacccatctggtgctcgccccggccatcggcggcagcctcgtcaactggacggtgcgcgccaccgggcagccgctgttacggcacagcgatgcacaggcgaccaataccgggctgccgggcaagctgggctgctatcccttggcaccctggtccaaccgaatcgctcaaggtgggttcgacaaccccgatggctggctggcactggcacccaatagcctcactgaccctctaccgattcacggttcagcctggcagcagccgtggcaggtgacaagccagtcagaacatgaagtggtgttggagctgcgctgcgaaacgcccttcgcctatcacgcccgccagcgggtgcacttggacaacggtgagttgaatatcgatttgtgcgtgactcacctcgccgagcaaccggcgtggcatgggctgggcttgcatccgtacttgccgcgccggccgggtacgcggctgcaggccagggctgggcaggtgtggatgagtgatgcagccaagctgcccacaggattggcatcggttccagaagattgggatttccggcaactgaaggaattgccagacgggctggtggacaacggcttttgcggctgggatgggcactgcctgatcgagcaaccggagcttggctaccgccttgaatgccaggccagcggcgccggttacttcctgctctactgcccgccggggttggaatttttctgcatcgagccggtgagtcatccggtgaatgcccatcaccttccaggcaggcctggcctgaaactgctggagcaaggccagtcaacccacctggcattcaacctgaaatacacgccaaatgcctgaactgtaggagcgagcttgctcgcgaaaaactcacaggcgccgcgttcattcagaaaacacgcgttatcgttgacgtttttcgcgagcaagctcgctcctacagttggaggatgcgtcagtgtcagggtgggctgtttttcaggcgcccggccgtgtcgatactcaccaccaccgacaaccccggtcgcaagcgttcactttcggcctggtccgggtctacggtgatgcgcacaggcacccgctgggcgatcttcacgaagttgccggtggcgttgtccgcctgcaacaggctgaactcggaaccggtcgccggggaaatatgctgcaccgtgccatggaatttgcggtggttcagcgcatccacggtgaacgtcaccggttggccgacctgcacattgtccatctgggtttctttcatattagcaatcacccacaactgcttgggcaccagcgccatcagttgcgcgccggaattgacgtacgcgcccaggcgcacgccgatctgcccgagctgaccatcccgtggtgccgtgatgcgggtattggacaggtcgatgcgcgccagttccaccgccgcctcggcactcgcgacagcggcctccagggagccgcggttgacgatcaccgtctgcaaatcctggcgggcaatttccaggctggcctgggcctgggccacggcagcgatggtctgcgcgttggcagcacgggtcacgtccagttcgcgtttggagaccgaaccatcgctgatcagttcttcattgcggcgcaaatccgcagtgctcttgcgcgcctgggcctggctgtcgaccagagcggcctggcgcagcttaatggtcgcttcggcgctgttgcgttgctgcaccacgttggccaacgaggctttctgcaccgccagttgcgccagggcctggtcgaggcgctgcttgtagatgcggtcgtccaggcgcaccagcaggtcgccggtcttgacgtactggaagtcctgcaccggcacttcgaatacataaccgctgagctgcgggccgataatcgtcacctgcccacgcaccaaggcgttttcggtggtttccaccgcgctgctgaacggcggcagttgccaggcgtacagcacgatcagcacaccgatgatggcgatggcggcaaagcccagggacgagatgatacgcacgcgcaaaggccgtaactgggtgggcaccgcgcccggtggcgtgctgccttccggcgtggcggcaatggcggtcgtggtggtggttgaaggttcggtcatgaagtcgcgccgctgggttgaacaggaggagttgctttggtagtgctcatcagccacaggctgcgggtgaagatccacagcatggtcaggatcgcgataatcgcaatcagcatgaagacatcgttgtaagccatgacgttcgcctcacgggtggccgccgtggccaggctgcggatgcccatgaggttgcgcagttccgggtcggcgacgatcttgccataggccgccccaccactctgcacccgcgccgccacaagcgggtcgatcagggtcaggtgctcgacgatcatgctcgaatggtacttctcgcgcacgatctggaaggtgcccagcaacgccgcgccgatcaggccaccgaggttctggcagatcccgaacatcaccgagaagctcaccaggttgcgtgggttggtcagcacattcttggtgcccagcaccatggtcggccccaggaagaacgtaccgccgaagcctagcaggaactggctgatatagaggttctgcgggcgggtcaggttgctggaaaaactgtccatcaccgaacctgtcgccatcagcgccagggagatgatcagcggcatcagcaggtgcgccgggttgatcgtcagcgcgctgaccaccagcccggcaatcgcgccggccaacatcaccacgtacagggtatgcatctgctggtagctcatgttcagcatctgcatgaaccccaccgcaccggtggactgctcggacagcaccatgcgaatcagaaccaccgccagcgccaggcggatcatcacgccgctgcccagccagcgcgtcatcagcatcggattgctgcggttatgctcgatggccagcccggccatgatcagcaccagggaacaggccgaggccacgccgatccacggcgcttccagccaccaatcgatgcgccccaaagatagcactgcgcagagcaaggccacgccgctggcgaggatggcgaaggtcaggaagtcgagtttttcaaaggttttgaagcgatcgcccggcggcagcttgagcaggaacacgcagcccaggcagatcagcgccaggcccagttcgaacaaatacagcccccgccattcagcgatttgcaacaagtcttcggaaaacaaccgcgccagcggtaacgccaactgcgcggtgcccagccccagcaccagggctttcaaccgccacttggccgggaatgcctggatcatgtagtacaagcccaacgaactcagcgccgcacccaccatgccgtgggcggcccgtaccgcaatcgccgaactgaggtcattgacgaacaaatgcccgaaggtcaccagcgcgtagagcaccaggaacacctcggtaaacgcacgcaggccgaactgttggcgaaacttcaccagcagcaggttcatgcacacgttggtcatcacataggcggcgggcaaccaggccatttccgcggtggtcgcgcccagggcgccttgcaggtattgcaggttggcgataaccagggcgttacccaggccgccggtaattgccaccagcacaccgaccatcgcgaagagccagcgcttatgcgtagggtgcagcggcgtcgacggcgagccaggcaggctcggccgctcgtggggttgccaggtgtggggggtgtatttatccattcggtgaccttggtaagccggggtgcaaggccggtgaatccgttacacagaggaacagtaacctgagaggcgttcatgttgccatcttgaggacgcatttgatccccaggcagacacagctaaatgtgggagcgggcgtgctcgcgaatgcggtagatcagttgctgatgcattgactgacacgacgacttcgcgagcaagcccgcccccacactgcaatccatgccgtccttagagagaggctttaagcaacataccgactgccaccaccacacacaggctagcaaaccccacttgcaaggcccgcgcggggatcaccgaacacaaccgccgtcccgccaacatgccgacgatactcgcgccgataaacacccaacccactggctcgatactcacgcccgcatgaaaggcaccggccactccgatcagcgacagcaggctgaccaccatcaaggaagtggcgacgatgccgcgcatctgcacgtcggtcagttgcttgaacgccggcacgatcaagaagccgccccccacgcccagcaaacccgacacggcgccggtcaccgcccccaacgctgccaaagtggcgctgcatttggcggtccaggccaggcgcccggtctgctggttgagcatgcagttcttctggccccacgacgccgagccatggtcactcggcccggcctcgcgcttttcccgttgcagcatgcgccaggccaccagcaccatcagcgcgctgaacaagcccatcagcaccggttccgagagttggtgggcgacgaacacgcccaacggcgaaaacagcgcgccgagcaaggcgatcagtagtgccgcgcggtaacgcaccaggccatggcgtaaaccatcgatggccccgaccgctgccgccgcgcccaccgcgagcaatgacacgggcgcggcctgggtcatggtcaagcccagccccagcaccagcgccggcaccccgaggatgccgccgcccgcgccggtcaggcccatgaccaggcccatcaatacccctaacagactgacgagcagcattcagtccaccttgctcaggcgggtcagccactcgcggcccttgagcatgccgttccagtagaaccacggcagcagcgtggccttgaggaaccacatcgaacggcgcgcctgcgttggatcgagagcaaaagtcggcagcaacttgccgccatagccaaactcggccagcaccaccttgcccttctccaccgtcaatgggcaggaaccataaccgtcgtacttgagcggcaatggcgcctgtttgcgcagggccagcaggttttcggccaccaccacgatttgcttgcgcaccgctgccgccgtcttggcgttggtggtgccgcacacatcgcccaggccgaagatatgcgggtagcgcaggtgttgcaggctgtgggggttcacttcgcaccagccggcggcgtcggcgagcaggctttcgcggataaaatccggagcgacctgcggcggtacgacgtggagcatgtcgaaggttttctcttcgaccgtcgcgttaccttgggcgtctttgacttcaaaccaggctttgcgcgccgggccatcgactttcaccaggttggaattgaacgccaggcgcgcgttgtatttttcgacgtacttcatcaagggcggcacaaaggtcggcacaccaaacaacgcggcaccggccaggttgaattcgacgtcgatgtgtttgaggttgccctgcttgagccagtggtcgcaggacaggtacatggctttttgcggcgcgccggcgcatttgatcggcatggccggctgggtgaacaacgccttgccgcccttgagctgctgcaccaactgccaggtgtacgcggcgtgctcatagctgtagttggaggtgacgccgtgttggcccaaggtgtcttgcaggccttcgattctttcccaggccaggcgcaggccagggcagacgatgaggtttttccaggtgacgcgttggccgttgtcgagcaccagggtgctttcaccgggcagcacttcgctgacagcggcctgcacccagctcacgccattgggcagcacatcggccaggggccggcgggtcttgtgcaggtcgtaggcgccgccgccgaccagggtccaggccggctggtagcagtggtagtcgttaggttcgatgagggtgatgttcaggtgcgggtcgcgcttgagcaggctggccagcaggccgatgcctgccgagccgccgccgatgactacgatatcgccactgatggtgggtccccagtgttgttcggtcattgtctactgcctttttgagtcaatgcacacaagggtcgctgccggatggcgtcacgcccaactttttatgaccgcgccgcaatacaggccggacagggtcttcatcacttgaatcacttcgtggctggccagcccgtagaaaatgtatttgccttcccgacgggtggcgaccaacccttcatcgcgcaggatgcccaactgttgtgacagggtgggctggcgtacaccggtcaaggcttccagctcaccgacgttgcgctcgccctgggtcaactggcacaggatcaacaagcggtcttcattggccagggccttgagcaaggcacaggccttggacgccgaagcacgcaactgggcgacctcgccctcactcaacgtagattccatttgcctcgggtcctttatgtcacttaagctcaaaacattatgtgtaaacgtaaactgattgtaaccacttttttcccaagcagagacagccgccatgccagcgttgattcaagcctttctggatgacgcatcgtcgacctacacctatatcgtctatgaggccgatggcggcccctgcgccattgtcgactcggtactcaattacgacccggcgtccggccgcaccgacaccgcccaggccgacaaggtgattgcctttgtgcgagagcatggcctgcacgtgcagtggctgctggaaacccacgcccatgctgaccacctgtccgccgcgccctacctgcgtcgcaccttgggcggcaagatcgcgatcggcgaatccatcagcaaggtgcagggtgtgttcaagaacctgttcaacctggagccggaatttcgagtggacggctcgcagttcgatcacctgtttgcaccggatgaattttttcacatcggcaacttgaaggcccaggccctacacgtgcccggacacacccccgccgacatggcctatctgatcgacggccgcttgatcctggtgggcgacaccctgttcatgcccgacgtcggcaccgcccgttgcgacttccccggcggtgatgcgcggcagttgtacgcgtcgatgcgcaagctgctggcgttcccttcagacaccaagctgtacgtgtgtcatgactatccacccgagggtcgagaagccaaatgccagaccaccgtggcggaacagcgggcgggcaatatccatgtgcatgacggcgtggatgaagcggcgtttgtacagatgcgcacccagcgcgatgctggattgggcatgccaacgttgttgctgccggcgatccaagtaaatgtgcgagcgggaaatatgccgccggcggaagaaaacggcgtgacctacctgaaaatccccctcaaccaactctagaagcacagcgttgtagcgttcaacggtaaccacgatgcgaagcgagtcgctcttgctcttgctcttgctcttgctcttgctcttgctcttgctcttgctcttgctctgcttttgatcttgatcttgatcttgatcttaggcgccccgtcaaaccacgctggccggaattcgacagggatttggggggtaaaccggcagggatgccggtttagccgccccgcgccatggatggcgcgtggcggcggccccccaaatcactggcggattacgggcacaccgagcctaagcgaggtgccgagtggtggggcaagagcgctttgcttactttcgcgcttttcgaaagtgagccgccgtcagggcggaaccctaagtggccgttaccgcaggaatggatatgtacacaatccagctgcattgactgtgaggccgtcttcgcaggcaagccagctcccacagttggatcgcggggtgccgtcatcacaggcaagccccacattttgtcccgtgttgaatcaggaaccgaggctgatgccgttggccggcaacggcagcgcggttttgtagcgcacctgcttcaaggcaaagctggagcgaatgttcgccacccccggcaccttagtcaaaaaatccatcatgaaacgctccagcgactgaatcgtgggcaccaacacgcggatcaaatagtccgggtcacccgccatcaggtaacactccatcacctccggtcggtccgagatcgccccttcaaattgctgcagcgccagctcgttctgtttttccaggctcacgtggatgaacacattgacgtgcagccccagcagatcagcatccagcagcgtaacctgctcacgaatcagccccagttcttccatcgccttgacccggttgaaacacggcgtgggcgacaggttgaccgagcgagccaggtcggcattggtgatccgggcattctcctgcagggcgttgagaatgccgatatcggtacggtccagtttgcgcatgagacaaaatcacctgtttattatgtttatgcagtttttttatccgcaaatagccggcgacgcaatgaaacagagataaatattcttctacgccacgcctatgattgttgtaggacaagatttcttctacccgaagactgactgtcagctagcgcgcccactacaagaaattcacaagatagagcgtagaaagccatgacccagccgtatgcaccgctgcgcctgcacgttcccgaaccctcgggccgcccaggttgcaagaccgacttcacctacctgcgtttgaccgacgccggcctggtacgcaaacccgccatcgacgtagaaccggccgacaccgccgacctggccaagggcctgatccgcgtgctcgacgaccagggccaggcccttggcccgtgggccgagggtgtctccaccgagatcatgcgccgcggcatgcgtgcgatgctcaagacgcgtatcttcgacaaccgcatggtggtcgcccagcgtcagaaaaaaatgtcgttctacatgcaaagccttggcgaagaagccatcggcagcgcccaggccctggccttgaatatcgacgacatgtgcttccccacctaccgccagcaaagcatcctgatggcccgcgacgtgccgctggtagacctgatctgccaactgctgtccaacgagcgcgacccgctcaagggccgccagttgccgatcatgtattcggtcaaggaggcgggcttcttcactatttccggcaacctcgccacccaattcgtccagggcgtgggctggggcatggcctcggcgatcaagggcgataccaagatcgcctcggcctggatcggcgacggcgccaccgcggaatcggactttcacaccgccctcaccttcgcccacgtgtaccgcgcgccggtgatcctcaacgtggtcaacaaccagtgggccatctccaccttccaggccatcgctggcggtgaagccaccaccttcgccggacgcggcgtcggttgcggcatcgcctccctgcgcgtggacggcaacgactttatcgccgtgtacgctgcctcggcctgggctgccgagcgtgcgcgccgcaacctggggcccaccctgatcgagtgggtcacctaccgcgccggcccgcactccacctccgatgacccatccaagtaccgtcccgccgacgactggagccacttccccctgggcgacccgattgcccgcctcaagcagcacctgatcaagattggccagtggtccgaagaggaacacgcggcggtcagtgccgagcttgaagccgaagtggtcaaggcgcagaaggaagccgaacagtacggcaccctggccggtggccagattccaagcgccgcgaccatgttcgaggatgtctataaagagatgccggagcacttgaagcgccagcgtcaagagctgggggtgtgacatgaacgaccacaacaacagtatcgaactggaaaccgccatgaccaccaccaccatgaccatgatccaggccctgcgctcggccatggatgtgatgcttgaacgtgacgataacgtggtggtgttcggccaggacgtcggctacttcggcggcgtgttccgttgcaccgaaggcttgcagaccaagtacggcagctcgcgggtgtttgacgcgcccatctcggaaagcggcatcgtcggtgtggccgtgggcatgggcgcctatggcttgcgcccggtcgccgaaatccagttcgccgactacgtctaccccgccaccgaccagatcatttccgaggcggcgcgcctgcgttatcgctcggccggccagttcactgcgcccttgaccatgcgcatgccctgcggtggcggcatctacggcggccagacccacagccagagtatcgaagcggtgttcacccaggtttgcggcctgcgcacagtgatgccgtccaacccctatgacgccaagggcctgctgatcgcctccatcgagaacgatgacccggtgatcttcctcgaacccaagcgcctgtataacggccccttcgacggccaccacgaccgcccggtaacgccgtggtccaaacacccccaagcccaggtgccggacggttactacaccgtgccgctggacgtggccgccatcgtgcgtccgggttcggccgtgaccgtgctgacctacggcaccaccgtatatgtgtcgcaagttgccgccgaagaaaccggcatcgacgccgaggttatcgacctgcgcagcctgtggccgctggacctggagaccatcgtcaagtcggtgaaaaagaccggccgttgcgtggtggtgcatgaggccacgcgcacctgcggctttggtgccgagttggtctcgctggtgcaagagcattgcttccaccacctggaagcgccgatcgaacgcgtcaccggttgggacaccccctacccgcacgcgcaggagtgggcgtatttcccagggccgtcccgagtgggcgcggcgttgaaacgggtcatggaggtctgaatgggcacgcacgttatcaagatgccggacattggcgaaggcatcgcggaagttgaactgtcggtatggcatgtaaaggtcggcgacctggtggttgaagaccaggtgctggcggatgtgatgaccgacaaggcgatggtggatattccctcgccggtccatggcaaggtgatttctctgggcggcgagccgggtgaggtcatggcagtgggcagtattttgatcagcattgaagtggaaggcgcaggcaataccaaggatgtgccggtggttgccgaacctgcgaaagccgcgcctgctgtggccgaagccaaaccggtacaggcgccggtagaaagcaagcccgcagcagtagtgaaagcaccgcaagcccccgtggcccgcgaagccagcgaccgcccattggcctcgcctgccgtgcgcaaacacgcgctggatgccgggattcaactgcgcctggtgcagggcaccgggcctgcgggccggattctgcacgaagacctggaggcttacttgcgccagggcccggcaacgggcgccagcgccgccaacccgtatgccgagcgtactgacgaacaccagatcccggtgatcggcatgcgccgcaagatcgcccagcgcatgcaggacgccacccgccgcgccgcgcatttcagctacgtggaagagatcgacgtcaccgccctcgacgagttgcgtgtgcacctcaacgaaaaacacggtgcgacacgcggcaagctgaccctgctgccgtttatcgtacgggccatggttgtcgccttgcgcgacttcccgcagatcaacgcccgttacgacgacgaagcccaggtcatcacgcgccttggcgccgtgcacgtgggcgtcgccacccagagcgacgtgggcctgatggtgccggtggtgcgccacgccgaagctcgcagcctgtggggcactgccgaagaaatcgcgcgtttggccaacgccgcacgtacaggcaaggccagccgtgaagagctgtccggttcgaccattaccctgaccagcctcggcgccctgggcggcattgtcagcacgccagtgctgaacctcccggaagtggccatcgtcggcgtcaaccgcatcgttgagcggccgatggtgatcaagggccagatcgtggtgcgcaaaatgatgaacctctccagttccttcgatcaccgtgtggtcgatggcatggacgcggcgcaattcatccaggccattcgcggcctgctcgaacaacccgccagcctgttcctggagtaagggcatgactcagacattgcataccacgctgctgattatcggcggcggccctggcggttatgtggcggcgattcgcgccggccaactgggcatccagaccatcctggtggaaggccaggcactgggcggcacctgcctgaacatcggctgcattccctccaaggccctgattcatgtggccgaacagttccagcaaaccgtgcaccatagccagggctcgcaactgggcattgaagtggatgtaccgaccctggacatccgcaagagcgtggaatggaaagacggcatcgttgaccgcctgaccaccggcgtcgccgcgctgttgaagaagcacaaggtgcaggtgatccacggctgggccaaggtcatcgacggcaagactgtcgaggtgggcgagcagcgcatccagtgcgaacacctgctgctggcaaccggttcgaagagcgtcaacctgccgatgctgccgattggcgggccgatcatctcctccaccgaagccctggcaccgacacacgtgcccaagcgcctgatcgtggtgggcggtggttatatcggcctggaactgggaattgcctaccgcaagctcggtgccgacgtcagtgtggtcgaggcccaggcccacatcctgccggcctacgacgccgagctgaccctgccggtggctgaatccctgaagaaactcggcgtgaagctgtacctggaacacagcgtcaccggttttaccgacggcaaactgcaagtgcgtgcgcccagcggcgacaccttggcactggacaccgaccaggtgctggtagccgtagggcgcaaacccaacacccagggctggaacctcgaagcgctgaacctggacatgaacggcgcggcgatcaagatcgacagccgctgccagaccagcatgcgcaacgtgtatgccattggcgacctcagtggcgagccgatgctggcgcaccgggccatggcccagggcgaaatggttgccgaactgatcagcggcaaagcccgcgaattcaacccggcggcgatacccgcggtgtgttttaccgacccggaactggtggtggtcggccagaccccggacgaggccaaggcggccggcctggactgcatcgtgtcgagcttcccgttcgccgccaatggccgggccatgacgctggagtccaaagccggcttcgtgcgggtggtggcacggcgcgacaatcacttgattgttggctggcaagcggtgggggctggggtgtccgagctgtcgaccgcgttcggcctgagcctggaaatgggcgcgcgcctggaagacgtagcgggcaccatccatgcccacccgaccctgggtgaagcggtgcaggaagcggcgttgcgggcgttggggcacgcgttgcacctgtaaaaccgcggcgtggccatcgcaggcaagccagctcccacacttgaaatgcattccaatgtgggagccgggcttgcccgcgatagcggtggatcagccaatgcagaggttgaatggtccgccgccctgctcccacaccggccaagaatgcagtattgttgcgcccatccagaaaaaaatccgacttgaccagagatagagggtgtcatgggtaacgagagcatcaattgggacaagctgggttttgactacatcaagaccgacaagcggtttctccaggtctggaaaaacggcgaatggcaagcaggcaccctgaccgacgacaatgtgctgcacatcagcgagggctccactgccctgcattatggccagcaatgcttcgagggcctgaaggcctaccgttgcaaggacggttcgatcaacctgttccgcccggaccagaacgctgcccgcatgcagcgcagctgtggccgcctgctgatgccacaagtgccgaccgacgcgttcatcgacgcgtgcaagcaagtggtcaaggccaacgagcgcttcatcccgccgtacggcagcggcggcgcgctgtacctgcgcccgttcgtgatcggcaccggtgacaacatcggcgtgcgtaccgcgccggagttcatcttctcggtgttctgcatcccggtcggtgcctacttcaagggcggcctggtgccgcacaacttccagatttccggctacgaccgcgccgcgccgcaaggcaccggtgccgccaaggtcggtggcaactacgccgccagcctgatgccgggttcggaagcgaagaaatccggcttcgccgacgcgatctacctggacccgatgacccattcgaaaatcgaagaagtcggctcggccaacttcttcgggatcacccacgacaaccagttcatcacgccgaagtcgccttcggtattgccaggcatcacccgcctgtcgctgatcgaactggcccagacccgcctgggcctggaagtggtcgagggcgaagtgttcatcgacaagctggaccaattcaaggaagccggcgcctgcggtaccgctgccgtgatctcgcctatcggcggcatccagtacaacggcaagctgcacgtgttccatagcgaaaccgaagtgggcccgatcacccagaagctctacaaagaactgaccggtgtgcagaccggtgatgtggaagcgccagcgggttggatcgtcaaggtctaacagccacaaactccagcgacaccacaaaaacttgtgggagctggcttgcctgcgatagcaaactgtcagccagcatattggctacagacccaccgctatcgcaggcaagccagctcccacactggtttctgcgccttcaagaacgtggcgcaatattctctgcaatcttcttgcccatactgatcttcagccccaccccattccccagcgcctcacaaaaccctaagttgtccagcgggacgcggagcgtcccaggcggaacccccacacagagcgcgggaacgatcaactgtaaatgcatccaccctgtcaagtttgacagtagagatgcgcagggatcgggattataaatgcagaggctggattctcaccaaacctcaaggagacacctcatgggcagctttattattcacctcacgacagatgacttcgaaggtgacgcaagcaaagaaatattgatggaagtactgaatgcccccaacgatcccgaccctcttctggtgtatgccagttccagcgagaaaaatggtttttatgaccgttcctcaagcccgggggatgccgacggtgacggcgatgtcgaaggggatattgacgacaagatcctgtttctgaacttggcgaatgcttttgcggcaatgaaaggctataccgcgaagcagaaaaaaaaataagcgtaagcctcaaaggttagacgggtgatcagagtgctgtcggtcatctactttgtcctggaatacactcaacgatcctcttacccatactgatcctcggctccaccccataccccagcgcctcataaaaccccaccaccgcgtcattgccgccggtgatctgcaggttgatcttcatgcaacccagcgccgtcaacgcctgttcggcatagcgcaccagcgacgatcccaggccatggcgccgatagtcggtatgcaccgccaccgaatacagccagccacgatggccgtcatagccggcgaggatggtaccgatcacagcgttgttgtcggtggcaacaaagaacaacccgtcattgaccgtcagtttcttatcaatcgccaggctcggcaggttatgggccgtgtcatagccaaacgcctgctgccataactcaatcacctgggcacggtgctgacggtcgcgatacggcccgatggggtggcgggacaacagcgccttttccatcaccaacgtgcgctcgttgccgtggtacacgtcacgcacgttgtgaaaacccagcttggcgtagaaggcttgcgccgtcagcgaggacggcacgctcaagaccgtcacgccggcttcacgggcgcgcagttcgatttcgatcatcaatagccggccgatgccctgcccttgcagtgccgggttgacgaacaccgagcgcaccacattgccatccagtgccgccgtagcgacgatcagttgatcctccgttgccactagcaccacccgccgctggagcaacgccagcaccgcgtcgggggtgaagttgctggcaacccgcgcaatcacatccgcggggtaatcacgcgcgttgctgctgtgcagcgcagccaggatgacttcactgatgccctcggcatctgagggttgggcaaggcgaacagcggtagacatggttcctcctggctgacacagcgataacaaacaccacaataccaatgtgggagctggcttgcctgcgatagcggtgtatcagtcagattaatggggctgacacaccgctatcgcaggcaagccagctcccacagtttgattgcatttcaacttggcagccgattcggctgcgccactcccgttttcagctttcttggctgagccaccccgctgtttcagccgggatcctttccccacaacgcacaaaatagcggcacaagatccccaacggacccgtgcccccatgcaaaccaccaacaccgtcctgatgatccgcccggcgcgctttgccttcaacccggataccgcgatcaacaaccgtttccaacgcccgccgctggacccgctcagtgcacagcacaaagcgctggaggagttcgacggttatgtcgacaccctgcgccagcacggcgtggaagtgctggtggtgcaggacacgccggcgccccacacgcccgactcgatcttccccaacaactggtggagcagccatgccgacggcagcctggtgctctaccccatggaaggccagaaccgccgactggagcgcaacaagggcgtgctgcaagtcttggagcaacgctttgcgatcaataccaccatcgacctcagccacctggaacaacagaacatcttcctggaaggcaccggcagcatggtgctcgaccgccagcaccgcatcagctacgcctgccattcggggcgcacccaccatgcggcgctgcgccagtttgccgaacgcctcgactaccaactttgcgtgttccacgccctggaccgtcaccaggcccccatctaccacagcaacgtgatgatgagcgtcggccgcgacctcgcggtggtgtgcctgcaggccctacccgacgacagcgagcgcctggccctggaacgctccctgcgtgacaccggcaaggacatcctcagcctggacttcgaccagctggaagccttcgccggcaacatgctggaggtccacgaccgggacggccagccgttgctggtgatgtccgccagcgcctggggcgccctgcatccggcgcagcgccagcatgtggagcgccatacgcggccggtggtggtgaacatcgacaacatcgaacgcatcggcggcggcagtgcccgctgcatgctggccgaagtgcatctgccggcccgtccctcatttcaataaggagttttgccatgacccgttatatcgacgtcaacgacctcagctacctggtttcgcaaaaaggcctgcaaacctgcatcaccgagatggccgactacattcgcgccgactacctgcgctggcaggatttcgaaaaatgcgcgcgcctggccaaccattcaccggatggcgtgatcgagctgatgccggtgtccgacgcctcgctgtacgccttcaagtacgtcaacggccatccgaaaaacaccctggccggcatgctcaccgtgatggcgttcggtgccttgggcgacgtcgacaccggcaagccggtgctgctggcggaaatgaccctgaccactgcgatccgcaccgccgccacctcggccctggtcgcccgctacctggcccgcgccaacagccgcagcatggcgctgatcggcaacggctgccaaagcgaattccaggccctggccttccacgccatgctcggcattactgaaatccgcctgttcgacatcgacccccaggccaccgccaagctcgccgccaacctcaaagcgttcccggcgatcaaggtgatcctggccgccagcgtcgccgaggcggtcaaaggcgcggacattgtcaccaccgtgactgcggacaaggcctacgccaccatcctgactgacgagatgatcgagccaggcatgcacctcaatgccgtgggcggtgactgcccgggcaagaccgagctggaccgccgcatcgtcgagcgcgcccgggtgatcgtcgagtacgaaccgcaaagccgcatcgaaggcgaaatccagcatatgccggaagattcgccggtcaccgagctgtggcaagtgatcaacggccaacagccgggccgcgagaatgaccgccaaatcaccctgttcgactcagtgggttttgccatcgaagactactcggccctgcgctacgtactggacgtggccaaagccctggaagtgggcagtgagctggagctggtgccggacctggccgacccgaagaacctgttcgcacgcctggcccagcaacctttggtacagcataaaaagcgcgcttgaaaccgctctggcctgccgctttgcgcccagggcaggccagattctgctgggttaaaagccgattttgccggtgtcacagccgattccgctgcattgcatgttttaacagcgcaatttgcgctttgcgcagggggtaaacgacacaaaaaacgcaccatcatgaagcattctctgctcccagttattcactgcccctgacatcaattacaaaatatagggaccgacacatgactcctctgcgatcactcttcgctgcgttgctgttgccactgtgcgccaccgccgcccacgcccaggactggaaagaaatccggtttggcgtgttccccgaatacccgcccttcgaatccgtcgccgccgatggcagcctgcaaggcttcgatatcgaattgggcaacgccatctgcgccaagctcgaagtgaaatgcacctgggtgcacaacgaattcgacggcatgatcccggccctgcgtgcgcgcaagttcgacgcgatcatgtcttccatggccgtgaccccggcccgcgagaaagtcatcgacttcactgaccggctgttcctcagccccacctcggtgatcacccgcaaaaacgccaccttcggtgacacccccgagtcgctgaacggcaagcaggtcggcgtgctgcaaggctcgttgcaggaagcctatgcccgcgcgcacctggccaagctcggtgcacagatcaaggcgtaccagtcccaggaacagaactatgccgacctgcaaaatggccgcctcgacgccaccctgacggacaagctcgaagcccagctcaacttcctgtccaaacccgaaggcgccgacttcaagaccggcccggccttcaaggacccaaccctgcccctggacatcgccatgggcctgcgcaagaacgaccaggctctgcgtgagctgatcaacaagggcatagccgccgtccaggccgatggcacctacgccaagatccagaagaaatactttggcgatcaggacatctacaacgagtaaccggcaacccgtgcccatgtgggagcgggcttgcccgcgatagccgtggttcaggcacccatgccgtgaccgcaccaccgctatcgcaggcaagccagctcccacaataaatacgtgcgctccttcgagatttccccatgaacgacctcctcaacctgcaaggctacggcccgatgctggcccagggtgcctggatgacgctcaagctggcgttcctcgccctggctctgagccttaccctgggcctggtcgccgctggcgccaaactctccagcgccaaatggctgcgtgtgccggccacgctctacaccacgttgatccgcagcgtgccggacctggtgctgatcctgctgatcttttacagcctgcaactgtggctcaacgacctgaccgaagcgttcggctggaactacgttgaaatcgacccgtttaccgccggggtggtcaccctggggtttatctacggggcgtatttcaccgagaacttccggggcgcgatcctcagtgtgccggccggccaactggaagccgccaccgcctacggcctgagccgctggcagcgctttcacctggtgctgttcccgcaactgatgcgctttgccctgccgggcctgggcaataactggctggtgctgctcaagtccacggcgctggtgtcgatcatcggcctgtcagacctggtcaaggccgcgcagaacgctggcaagtccacgagtgagccgctgtacttcctgatcctcgcgggcctggtgtacctggtgattaccactctctccaaccgcatcttcaagcgcctggaacggcgctataacctgggcatcaaggggatggcgcgatgatcgaactgttccagcaatacggcctggcctacctgttcagcgatggcagcggtgtgtccggtgttgccatgaccttgtggctgttcattatctcggtggtgctcggcttcggcctgtcgatccccctggcgctggcacgcgtgtcagagcatttctggctgcgctggccggtggaggtctacacctacctgttccgcggcacgccgctgtatatccaactgctgatttgctacaccgggctgtacagcctggaggtggtgcaggacaacgccttgctcaaccagtttttccgcaatgcgctgaactgcacgctgttggcgtttgtgctcaacacctgcgcctacaccgtggaaattttcgccggggcgatccgcaacattccccatggcgagatcgaagcggcacgcgcctatggcctgcacggctggcggctgaacctgtttgtgatcgtgcccgccgccttgcgtcgtgccctgccggcctacagcaatgaaatgatcctgatgctgcacgccacgtcgctggcgttcaccgccaccgtcgccgacatcctcaaggtcgcccgcgatgcgaatgccgagacgttcctgaccttccaggctttcggcatcgccgccctgctctacatgctgctgtcctttgcactggtgggcctgttcaggctggccgaacgtcgctggatgcgctttcttgttcctacccgaggctaacccatgaaccagtccgcgcaggccctggccgcttatccaatggatgtacccgtcggcaacaccgccacggcggccatcaagctgcaagtcgaaggtatccataaacgctacggcgaacacgaagtgctcaagggcgtgtccctcaacgcacgccagggcgatgtgatcagcttgatcggcgccagcggttcgggcaaaagcacgatgctgcggtgcatcaactttctggaacagcctgacgccggggtgatcaccctggacggtatcagcatcgaaatgcaaccaggccgcgccggcacccgtgcgccgcaccaggcgcaactgcaaaacctgcgtacgcgcctggccatggtgttccagcacttcaacctgtggagccacatgaccgtgctggaaaacatcaccatggccccgcgccgggtgctgaacgtgagcgccgccgaagccgagaagcgtgcgcggctgtacctggacaaggtcggcctgccgagccgcgtggcggaccaatatccggcgttcctgtccggtggccagcagcagcgcgtggccattgcgcgcgcgctggcaatggaaccggagattatcctgttcgatgaacccacctcggccctggacccggaacttgtaggagaagtgctcaaagtcatacagacgttggccgaggaaggtcgtaccatgctgatggtcacccacgaaatgggctttgcccgccaggtgtccagccaagtgctgttcctgcaccagggccgagtcgaggaacacggcggcgccgagatcctcgaccatcccaccagcgaacgcttgcagcaatttctttccaaccgtttgaagtgaactcatggataccaaggccaacggaccccattcttcccctacgctggatcgcatcgacgaagcgatcatcgacgtactcaggcatcaggggcgtatcacctacgaaaagctctcgtcgctggtgcacctcacccccaggccctgcctggaacgggtgcgcaaactggagcgacgcggggtgatccgtgggtatggggcgatcatcgatgtgcagatggtctcaccggggctgtcgctgctggtgctggtggccttgtccaaccaaagcgggcgctcggcgcaaaaggccttcgaagcctgcgtcaaagcctgcccgcaggtgttcgaatgccagttgatcagcgggccgttcgactacagcctgcgcatgcgctgccgcgacatggagcattaccgggtgctgaccgagacctggttgaacaatgatgagttgcacattgataagttggtggcgcatccggagttggcggtggtcaagaacaccgcgaccgaactggcctgaacgagctagctcgttcccacgctctgcgtgggaatgcatccaatgacgctccgcgtcacaacttcaagagcagacgcggagcgtccagggtggcattcccacgcagagcgtgggaacgatcaaccgaactggcctgatccagctagctcgttcccacgctctgcgtgggaatgcatccaatgacgctccgcgtcacaaaacttcaagagcagacgcggagcgtccagggtggcattcccacgcagagcgtgggaacgatcaaccgaactggcctgatccagctagctcgttcccacgctctgagtgggaatgcatccaatgacgctccgcgtcacaaaacttcaagagcagacgcggagcgtccagggtggcattcccacgcagagcgtgggaacgatcattcacccctgcccacttaatattcttttgcctggcttggcacccaccagcttcgcctgcccatctttctgcttgcccgtgcgggcttcactgatcagccccggaatcaacttgccctccggcaaattcttccagaagcggctgggcaaatgcccttccatcactttgggattgagccgcgccgggttgaagatgtggctgtagtaggtcagccacatggcgctgtggggatcttcaacattctgtgccagttgctgccaggcctcggggcactggcgctgatgaatcagttgttcgccgtcgtagtacaccccgtccaggggcgtggcgatcatccagcggtggcggcccatgcgcccgacaaagtgctcgctggcgctcttgagaatgtcatgggccggctcatgccaggccacgtactccggcagttccgacccggccccggccggcagcgcgatgaagcgcacaaacgcgtgcaagtggtgggcctcccggctgacttgcttgatgcgccgttgcaactcgctgccaagcttgtcccctgccagcatggccgtgcgatcaccatggctgacccgccacagcacttcatacagcaggctccagcgctgatcaccgtgataacaggcagcggactccagtaattgcaacaacgccttgggtatgcgcgcctgaaacggccccatccctggtgggatcggttgatcggtagcaaacaggtctgccgcctgcatctggccccagctcacctggctagggtcgacctgatggctgagcaaccagcgtgcctgttcgcgccaagtgctgaacaggttgtcgcattccaggctgatcatccccacagccccatctgttgcggctgcgggcgatcacgcagttgttcacgcagcaacacactggtgctgtcggcctgttgcgggtggtagtcgctggtgatgaaaaacggcttggccttggccaacacgcagcgcatgcgcgccaggtcttcgaagcggatcttgcgttcacggcgcaggtcgaccaggcgctgggtggtgcgcaggccgatgccggggatacgtgcgatcagggtgggctcggcgcggttcaggtccagggggaacacctcgcggtgctccagggcccaggccagcttggggtcgatatccagtgccaggtcaccggggccggcgaacagctcattggcgcggaaaccgtaactgcgcaacaggaaatcagcctggtacaagcggtgctcgcgcatcagcggcggcgcggctaaaggcacgcttttcgggctgttgggaatggggctgaatgccgagtaatacacacggcgcagcttgaaattgccgtacaacgcctcggcaccgtgcaggatggtgctgtcgtcggtgtcatcggcgccgacgatcatctgcgtgctctgcccggccggggcgaaacgaggcgcgcggggttcattgagcaccgtctgctcgccggtgtagatggtctgcatggcctgcttgatcgagccgatctgcttctcgggcgccagggtttgcaggctggcgtcggtgggcagttcgatgttcacgctgaggcgatcggcataacggccggcctcggcgatcagggccgggtcggcatcggggatggtcttgaggtggatataaccgcgaaagtcatgctcttcgcgcagcagcttggcgacccgcaccagttgctccatggtgtagtccgacgaacggatgatgccggaactgaggaacagcccgctgacgcaattgcgcttgtagaaatccagggtcagggtgaccacctcctcggggctgaagcgcgcacggggcacgtcgctggagcggcggttgacgcagtattggcagtcgtagaggcagaagttggtgagcaacaccttgagcaacgacacgcaacggccatcgggcgtgtagctgtggcagatgcccatgccattggtggaacccagccccgccttgccctcggaactgcgcttgggcgcgccactgctggcgcaggacgcgtcgtacttggcggcgtcggcgaggatgctgagtttttcgatcaactgcatggagggctaccgatactggttttttgtacagtaccaatagccacaccttgtcacaagtgccgtctgtaggagcgagcttgctcgcgaagaaggcaagagcgccgcgttcattcagatgaggcgcgttatcgttgacgttcttcgcgagcaagctcgctcctacaggggatcggtcagctggcagtagccaggagcaagtcctgcaccgaacgtcctttgtcgcggtttcgatcgtgctcatacaacgatgccgcaatctcatccgcccgaatcggcagcaccgacagcaaggtatcgctcaagccatggctggcctggctgaagccctggatgtagatgccggccttgcagcgttcgtcggtgacgatgcggtagtcgcgggccacttcgaagtcgcccatgtaggcctccagcggcgccagcagttcacggtgcatctggcgctcgtagccggtggccaggattaccgcgtcgtaatggttgaggctggtttcgccggtggcgctattgcgcagggccagttcgatacccagcgggcctggggtggctttctccactacggtcagggtgcggaacgcctggcgggcgatgccggagactttctggcggtagaaaatcccgtagatgcgctcgatcaggtccaggtccaccaccgagtagttggtgttctggtactcggcgaccaaacgctcacgctcggcaccgacttgctggaacaccaggtcagtgaaagctggtgagaacacttcgttgacgaacgggctgtcgtcggctggcttgagcgccgagccgcgcaggatcatgtcgacctgcaccgacgggaagctgtcattgaggtcgataaaggcttcggccgcgctctggccaccgccgatcacggcgatgcgcatcggcttgccgtctacgcacggctggttggccatgcgctccaggtactgggaatggtggaacacccggctgtcgccgttgagcgccttgaaggcgtcggggacgcgcggcgtgccaccggcgctgaccaccaccgaacgggtggtgcgcacatgctgctcgccctgggcatcgcgggagatcacgcgcaacgcctcgacctgctgctgatgcaggatcggctcaatggccagcacttcttcaccgtagttggcctgggcctggaactgccccgccacccagcgcaggtagtcgttgtactccatgcggcaggggtagaaggtgcccaggttgatgaagtccaccaggcggtcgtgggccttgaggtagttgacgaaggagtacgggctggtggggttgcgcagggtcaccaagtccttgaggaaggaaatctgcagttcgctctgggtgaccagggtattgccgtgccagcggtagtcggcttgtttgtcgagaaacagcacgtccagcttgccctgggccttttcacgctcctgcagggcgatggccagcgccaggttcgaagggccgaaaccgatcccgatcaggtcatgaaccgcgggcgaagcaattgcctgtgtcattccagtgtcctctggataagccccttggcgatggggcgggaataccttcatggcctgaacaacaggccgtgtgttgataggaaacgaggacagtgaaataaaatttaactaacagccgatcagtgcgcttcccactcgcgcatgcgcacccggcagtgcttcatcgcattgacgatgtgtttttccaccaggctgcgggaaatgcccaggcggtcggcgatttgcaggtgggacaggccttcgagtttgcgcaacaggaaactgtcgcgacaggccgccggcagctcggccaaggcgcgctcgagcatctccaggcgctggccctgatcgtggctggcgtggggggaacaggcggcgaagcgctcttcgctgtccagcacctccaggggctcggcctggcgcacggcattgcgccgatggccgtcgatcaccaagttcaaggcggtgcggtacaggaaggcgcgcggttgttcgatcggggtgtcgctggagcgttcgagcacccgcacataagcgtcatgcaccacatcttcggccacctgacggttgcccagcttggcgttgaggaaacacaccagctcgcgatagtagttttccaccatgactcctgaccccacggccttaataccaacgacgccccccccctgtaggagcgagcttgctcgcgaaaaacccaagagcacatccgcttacctgaatgcacccgcaaccaatggcggttttgccatcaccgatgatggcagtttgagcgtgtgcaatttatagtaattctcatctacttttaaagaactctctcgtcagcggtcgaattttttctccaaccgagctgtaactacttatgtaacagcctaaattccggggcattttcctcgtttacctgtcagctctgcgcgactgcgccccgaactttcctggctggaagctaccgatgaaacgccctcgacctgcccgacgcgccctgcttgtggtggcgtgcctgattcccatcgttgcgtttgccacctggcagggcctgacgccgggccgcgacgccctggccaccgtcaccgtgacccgcgccgacatcgaaaacagcgtcaccgccctgggcaccctgcaaccgcgacgttacgtagacgtcggcgcccaggcctccgggcagatccgcaagatccacgtcgaggccggcgaccaggtccaagagggccagttgctggtggagatcgaccccgccacgcaaaaagccaagctcgacgccagccgctatgccatcgaaaacctgcaggcccagttgcaggagcagaaagcccagcatcaactggcccgtcagaagtaccagcgccagcagcgcctgagtgccggcaacgctacccgcgaagaagacgtgcagaccgccaaggctgaactcaacgcgacccaggcacgggtcgagatgttccaggcacagatccgccaggcccaggccagcctgcgcagcgacgaagccgagttgggctacacgcgcatctacgcgccgatgaccggcaccgtggtggccgtggacgcgcgcgtcggccagaccctcaacgcgcaacagcaaaccccgctgatcctgcgcatcgccaagctgtcgcccatgaccgtgtgggcggaagtttccgaagccgacatcggccatgtcaaacccggcatgagcgcgtatttcaccaccctgagcggtggcagccggcgctggaccagcaccgtgcgccagatcctgccgatcccgcccaagcccttgaacgaaacccagagcaacggcagcccgagcagtaccagcaagagcggcactggccgagtggtgctgtacacggtgctgctcgacgtagacaacgccgacaacgcgctgatggccgagatgaccacccaggtctttttcgtcgcaagccaggttaaagatgccctcaccgtaccggtcgcagccttgcaaggcgtgcctggctccgcagcgcaaatcgcccgggtggtggccaaaaacggtgccatcgaagaccgcgaagtgcgcctgggcatcagcgaccgcctgcgcgtcgaagtactcggcgggctgaacgagggcgaccacctgttgatcggcccggctgacagccatgggggctgaattgaccacgccgctgattgaactcaaaggcattcgcaaatcctacggcggcggcgacagcccgcaggtcgatgtgttgcgtggcattgacctgtcgatccatgccggcgagttcgtcgccattgtcggcgcgtcgggctcgggtaaatcgacgctgatgaacatcctcggctgcctcgaccgccccaccgagggcgactacctgttcgccggggaaaacgtcgcccacctgggcagcgacgaactggcctggctgcgccgcgaagccttcggttttgtgttccagggctaccatttgattccctcaggctctgcccaggaaaacgtcgagatgccggcgatctatgccggtatcagcgccaccgagcgtcatgcccgcgcacgcgccctgctcacccgcctgggcctggccgaacgcaccggcaatcggccgcaccagttgtccggtgggcaacagcaacgggtgtccatcgcccgcgccctgatgaacggcggccatatcatcctcgccgatgaacccaccggcgccctcgacagccacagcggcgcggaggtcatggccttgctcgacgaactggcgagccagggccatgtggtcatcctgattacccacgaccgtgaagtggcggcgcgggccaaccgcatcatcgagattcgcgacggccagatcatcagcgatacggctgacacccgcgcagacacacccagcgtggcggccggcgccttgcacgccgtggacctgcgccatcgcctggccgacggcgccgagcacaatggtgcctggaaagctgaattactggatgcggtgcaagccgcctggcgggtgatgtggatcaaccgttttcgcacggcgctgacgctgctgggcattatcatcggcgtcgcgtcggtggtggtgatgctggcggtgggcgaaggcagcaagcgccaggtcatggcgcaaatgggcgcgttcggctccaatatcatctacctcagcggttcttcacccaacccgcgtacgccgctgggtattgtgtccctcaacgacgtcgccgccctggcgacgctgccgcaggtcaagcgcatcatgccggtcaacggcaccgacgcgggcgtgcgcttcggcaatgtcgactacatggcctatgtggggggcaacgacaccaacttcccggagattttcaactggccggtggtcgagggtagctatttcaccgaggccgacgaacgcgccgccgccacggtcgccgtgatcggcgcgcgcatccgccaaaagttgttcaaggacgtggccaaccccatcggccagtacatcctgatcgagaacgtgcccttccaggtggtcggcgtgctcgcggaaaaaggctccagctccggcaacaaggacagtgacgaccgtgtcgccattccttacagcgccgccagtgtccgcctgttcggcagctacaaccccgaatacgtggcgattgccaccaccgatgcgcgcaaggtgcatgaagccgaacgcgccatcgaccaactgatgctgaagttgcacaacggcaagcgcgactacgagttgaccaacaatgccgcgatgatccaggccgaagcgcgtacccagaacaccctgtcgctgatgctcggctcgattgcggcgatttcgctgttggtgggcggcatcggcgtgatgaatatcatgttgatgaccgtgcgcgaacgcacccgtgaaatcggcatccgcatggccaccggggcacgccagcgcgacatcctgcgccagttcctcaccgaagcggtgatgctctcggtggtcggtggcctgttcggtattgccctggccttgctggtgggcggcgtgctggtactggctgaagtggcggtgcagttttccctggtggcggtgctcggtgcgttcggctgtgcactggttaccggtgtcgtattcggctttatgccggcccgtaaagctgcccggctcgatccggttaaggcgttgaccagtgaataaacgatctctcactccacaactgtcagcgctcagtgtgtgcctgttgctcacggcctgtggcgctaacccgcccgccatcgacagcggcatcgctgcgcccgccgcttggcactatgccgagcacgaggtaaaccaagccaccaaccaacactggtggacgcagtttggcagcccggcgttgaaccgcctgatcgaccaggcccgccgtgacagcttcgacgtagcggcggccatggcgcgtgtccgccaggcccaggccacggcggtgatcgccggtgcaccgttgttgccggagctgaagttcaacctcggcgccagccgtcaacggctgttgcgcggcagcggcaactcggagctggacgccaccgagagcaacaggaccgtcaccaactatgacgccaacctcacggccagctacgaaatcgacttctggggtggccgcgccgctgcgcgcgacagcgccgtgcacagcctgcaggccagtgagttcgatcaggccaacgtggagctgaccctgctcagcaacgtcgccgaccgctacgcgcaaaccctggccgcacgccagcgtttgcagattgccgagctcaacctggcgaatgcgcgcaatgtgctgaacctggtgcagacccgctttgatgccggttccgccacggccctggaactggcacaacagaaaagcctggtggccggtcagcaacggcaactgccgctgatcgagcaatcggccgaagaatcgcagatcaccctcgccgccttgctcggccagcccgtgcaggccctggacctgggcacagaacccttccatgcactgagctggccgagtatcgggcccggcgtgcccagccagttattgagccggcgccccgatctcgcccaggccgaggcccaattggcggcggccagtgccgacgtcacggtggcccgtgcggccatgctgccgacggtgacgttgggcgcaacgctcggctcgggcgcgtccaaggccgaagagatcctgcgcagccctttctacacactgacctcgggcctgatggcgccgatcttcaacaatggccggctgagcgccgagcgcgacaaggctcgggcacgccaggatgaactgctgcaaacctaccgcggggcgatcatcaacggctttgccgatgtggaaaaagccctcagcagcatcacccgcctggaccagcaacgccagtggcaaaccgaggaactgcaccaggcgcagaccgccttccagattgcccaaagccgctatgaggccggcgccgaagacctgctcacggtactggaaacccagcgcaccctgtacgacgcccaggaccagaacgtactgctgcgtttgtcgcgcctgcaggccagcatcgccctgtacaaagcgctaggcggtggctggaacaccgatatctgataaacgaaactcatatttcatacaccagctgtttcttcaccttacattttccaccccaaggtccttggtaaaaaagccgttatcacacggatgcccgggacctcatgatgaaacccagcgcttttgtaaacggcctggcctgcatcggcttctggctgataccaaacctggcgttggccgagcccttgatcgcccccaccgcgatcgactggttgctggactgcccactcactgcaacagcgcgcctggaccccgaagtggttggccgcacccaatgcggcctggtcagcgtgccccgcgaccatgccgccccccagcgcggccgcatacgcctgagcgtgacacgggtaggcgcacggcagccgctcaaccgtgagggtgtggtgttcatccaggcaggcgacccccaacaggccaaaggcgcacctttcgtccttcacctggccagtcgctgggagtcgcttgccacccaggcctatcgcaccctggtcgaccgttatgacgtgatcgagctgagcacccgcgacctgcgccaaggcaatggcgtggaacaggccgcgcaggatatggagttcgtgcgcgggcaactgggcgaggcacgtctcaactacctgggcaatgccgcggccactcgcctgggcagccgctatggcacgctgtttcccgagcgcgtcgggcgcatggtgctgatcaataccgaacctggcgaaccactcgccaccggtgtcgagcaactcttgctcaaggagtcggcacacgcaggcgccgacggctgcgtgagccgttggctgggggatttcctcgcttacggtaaacagccgccggcgtccgcacgctgcctggatttgggcgcctgggaataacctgcgcatttacgacccctattcaccgaaaacgaccccttgcgttgacgcccctgcccaatcgttattaagtactatttatccgcattaatacgataaatcaccgccatgctgagtcgaccgctacgccgcaaacgccagaagctgtccgatgtgattgtcgagtcggtcaagcgctcgatcgtcaccgacgccttgaagcccggcgaccgcctgcccaccgaacgcgagctgatggaaagtttccagtgttccaagggctcggcgcgcgaagcgctcaaggcgctggaggtcgaaggcctggtgagcacacgcaccggccccagcggcggggcctacttgaatcaggccggcactgaaccggccagccgcgccttgcgcaattacctgcacttccagcacctggacggcgagcaggtctaccaactgcgcaaggtcatcgaagtggaactggcagtgtcggtgctggggcgtttgagcgaagacgattacatcgccctgcaagccaacgtggagttttgcagcgcccccgaagacagcgaagccggccagcgcgaacagcgcctggcggaactggagttccacaacctgctggcccgggcgtgccccaacccgctgctgagtttcatggcgcagtttctcaatgacttgctgcgcgatctggtggtgctgaaaaaggcctacaagcccaagcgcaagcagttcgacgcggccaacctcgactatcacaagcaactgctgatcgcctttcgcgctggggatgaaagcgcggtacgcagcttgatgcatgaacacatgtgcgatgccgaacaccatatgaccgcgctggaaggccaggtaagcccgcacttcctactggagttcgaccactcttaaacacaccgaacatccaatgtgggaacccgatcaatgtgggagctggcttgcctgcgatggcatcgactcggccttccctgtaataccgaggcgcctgcatcgcaggcaagccagctcccacatctaataacaagcctgcccacaggcccttgctccaccgtatcgcccttgccgctcctgccaataactaaaccagggagtcaccccatgcagcgtcgtacgttattgaaagccagcctcaccgccgccgccgccctcagccttccgctgagcgtgcgttcggcattcgccgccgagccttttaccttttacggcctcaagtccatgtctggcgcctttgccagctatggcaaatttgccgacatgggttcgcgcctggcggtgcaacaacacccccaattgctcggccgcccgctgaactacaaggtcatcgacaccgaaggcaacgccggcaaggcggtgcgcaaggtgcaggaggccatacagcaggacggcgcgcggttcttccagggctgcacgctatcgtcttccgccctggcagtggccaaggaagtggacaaggtcggcggcgtgttcatgaccccggtgggcgccgatgaagttacaggcaaggactgcaacaaggcgaccttccgctggtcggtccccacctacggcgcgatccgcgaaaccatggtaccgctgatcaagctgctgccggacgccaagcgctggtacaccatcaccccgcaatacgtgttcggcgaagccttgctcgaaggcgccaagaacgtgctcaaggaacatggcctggaacacgtgggcaacagctatcactcgctgcaagaacaggaattctccggctatctgaccaacgccatttccaccaagcccgatgtgctggtgctgctcaacttcggcagccaatcgtccaacaccctgcgccaggcggtgaacttcggcatcaaggaacgcatgaaggtcttgctggtgtggtctgccggcctggatcaattccaggaactgggcagcgatgtgctcgaaggcgtgtacctgggcgcgcagtactggcatcaggtcgacaccccgctcaaccgtgaactggtcaagctcacccaggccacctacggcatcaaccctacctacccgctggccgccgactacatcagcaccaaagtcatgctcgacaccatcattgccaccggcagcttcgacggcccgaccgtggccaaggccatgcagggcttgagctacgaaggcccgaccggcaaggagtcgatccgcgccggcgaccaccaggtgatcaaggattattacctgttgatcggcaaggccagcggcgacatggccgacaaggacgacctggccaaagtgctcagcgctggccagtcgttccccgcagtcgaggcgacgggctgcacactcggctgaccgcttaacttttgtcgcgcagggccgtgcaagcggccgtctgcggagggtgcctgcatgcttaatctgtacctgttccagattctcaacggcctcgggttggggatgatctacttcctgatcgcggtggggctgacgatcattttcggcttgctcaacttcgtcaacttcgcccacggcgcgttcttcctgctcggcgcctacatctgctacaccgccgtgagccttaccggcaacttctggctggcgctgctgatcgcgccgctggtggtggccgcgctggcctgggtgatcgagcgcttgctgatccagcgcatctaccacttgccgcacatgttccagattctggtgaccttagggatcgccctgatcatccaggaagccagtgtgatgatctgggggccggtgggcaaaagcgtcgccgtaccggaactactgcgtggcgtgctggtggtaggagattttgtctacccctactaccgcctgttcctcatcgtgttttccgcgctggtgggcctgggcctgtggctgctgctggaacgcacgcgcttcggtgccctggtgcgcgccggcagtgaaagcactgaaaccgtgtcgctgctgggcaccaatattttccgcctgttctccatgaccttcgccctcggcgtcgccctggccggtgtcgccggggttttgttcgcacccttgcgcggcgcccagcccttcgtcggcccggagattttgggcatcgccttcgtggtggtggtgatcggcggcatgggctcgttcagcggtgcgctggtcggcggtttgctggtgggcgtggtgcaaagcctgatgaccacactctggccccagggtgcgagcctgatgatctacggcgccatggccgtggtgattctggtgcgcccttacggcctgttcgggagagcctgacatgagcgagaaaaaccccctgccgttcgccaagacccaatccagagccatgttgctgtgggtgctggccgtgctgatcggcctgccgttggtattgccctcggcgaccctggccaccgagatcctgatctttgccatggccgccctggcctgcaacctgctgctgggctacaccgggctgctgtccttcggccaaggcatcttctttggcgccggcgcttattgcgcggcgctgttgatgatccacctgcaactgggcctattcaccgcgttgctgggcgcggcgctggccggcggcgtgctggctttgctggtgggtgccctggcgattcgacgcaccggcatttatttcgtgatgctcacgttggcgttcagccagatggcttactttgttgcctacaccctgagcgactggaccggtggcgacaacggcctcctcagcgtgccgcgcccggaaatccgggtgggtgacaccgtgctgctgtccctggccgatgcccgcgcgttctacggttttgtcgcggtgctgttcttgctgatcttcgtcggcgcacgtcgggtgatcgcctcaccgtttggcagcacgctgatggcgattcgcgaaaatgaaacccgcgcctcggccatcggctacgacacgcgccacttcaagatcctggtgttcgtgctgtccggcgcggtcaccgggattgccggggcgctgtacgccatgctgctgcactttgtgccgctgtcgaatatcgacctggcgatgtccgagaacatcctgatcatgaccatcgtcggcggcaccggctcgctgttcggctcactgctgggcgccggctccatcgtgctgctgggggatttcctctccgacctgtggccgcgctggctgatgctgctgggggtgatcctgatcctggtggtgatcttcatgcgcggcgggttgtggggcggcctcgcgtcgctgttcgagaaggtgcgcggcacgcgcaaacccgtggtcgtcgccaaggaggacgggctatgagtatcttgctggaaacccaaaacctggagctggcctacggcgcgttccatgcggtcaatggcgtcaacctcaaggttgaagccggcaccatccacaccatcataggccccaacggcgccggcaagaccagcctgttccattgcctcacgggtgagcgccaggccaccgccggggcgatccatttcgacggcaagaacctgatgcgcaagcccgcccacggccgcgtcggcctgggcatggcgcgctcgttccaactcaccagcctgttccagaacctcagcgtgcgcgagaacctgcgactggccgcccaaggccgcgacggcgtgcgagccttgaatttctggcgtcgggtcgacagccagcgcgaacacctggagatggccgaccaggtgctggaacgcctgcaactcacggcacgcgccgacaccctggccggtgagttgtcccacggccaacaacgggtgctggaggtgggcatgtcgatctgctccaaacccaaactgttgatgctcgacgagcccacctcgggcatgggcatcgacgatatcccgatcatgacccaactgatcagcgaccttggccgcgaccatacggtgctgctgatcgaacacaacatgagcatcgtcatgtccatcagccagcgcatcacggtgatgagccatgggcagattctggtggaaggcacgccggaattcgtgcgcgccgatgaacgtgtgcgcactgcctatcttggggaggctgcctgatgctgatcgtcgagaatatccattcctactacgacaaaagccatgtgctggagggtgtgtcgctgagcgtcaaccccggcgaactggtgaccctgctcggccgtaacggtgccggcaagaccaccaccctgcgcagcatcctcggcatcatctgcccgcgccagggccagatccacttcaacggccaggcgctggtcgggcaaaagatctttgaaattgcgcgccaaggcctggcgctggtaccggaaaaccgcggaattttccgcctgctgacggtggaagaaaacctgcgcatcgccgcccgcaagcacagccgctggcaactggaagacgtatacgccatgttcccgcgcctcaaggagcggcgcaaaaacgccggccacgcgttgtccggcggcgaacagcagatgctcgccatcgcccgcgccctgctgaacgatcccaagctgctgatcctcgacgaacccactgaaggcctggcccctgtgatcgttgacgagctggtgaagatcctgcgcaaggtcaaggacgagggcctgccggtgttgctggtggaacagaacctgatggtctgcgacaagctcgccgaccgccattacgtgctcgaacagggccgcgtggtgtacgaaggcagcgccgctgacttccgcgccgacccgacgatcaaaaaccgatacctggccttgagtgcctgagtggagattcctgatgaacagtcttgcgcaaccgctccagagcaatgccccgctgatcaaccgcgaccgcttgtggcagtcgctgatggacctggcccggctcggcgccacggccaagggcggcgtgtgtcgcctagccctcaccgacctggaccgccaggcccgcgacctgtttgtgcagtggtgcgaagccgccgggtgcagcgtcagtgtggatgccatcggcaatattttcgcccggcgccctggccgcaaccccgccctgcccccggtgatgaccggcagccatatcgacacccagcccaccggcggcaagttcgacggttgctacggggtaatggccgggctggaagtgatccgcacgctcaatgacttgcagatcgaaacccaggcgcccctcgaagtggtggtatggaccaacgaagaaggctcacgcttcccgccgtgcatgatgggctccggggtatttgccgggaagttcgacttgcaggagaccctcgacaagcgcgacgaccagggcctgtcggtgggcgccgaattgcagcgcatcggctatgcaggttcgcgtgcggcgctgggccacccggtgggggcgtatttcgaagcgcatatcgagcaaggcccggtgctggaggaccaggccattaccctgggcgtggtgatgggctgcctgggccagaaatggttcgacctgaccctcactggcgtggaggcgcatgcgggccctacgcccatgcacctgcgcaaggatgccctggtgggcgctgccgaggtggtcagcgcggtcaaccgtatcgcccatcagcatcagcctcacgcctgcggtaccgtcggctgcctgaacctgcaccctggctcacgcaacgtgatccccggccaagtaaacatgaccatcgacctgcgtcacctgcacgccgacaagctgcaagccatggtcgacgaagtgcgtagcgtgatcgaggactccactgcccgccacggcttgacgtttgaactgacgcccaccgccgacttcccgccgctggacttccacccggcctgcgtcaatgccgtgcgtgaaggtgccaaggcattgggcttgagccatatggacatcgtcagcggcgccgggcatgacgcgatcttcgtcgccgaactgggcccggctgggatgatctttgtgccgtgcgaaggcggcatcagccataacgaaatcgaaaacgccgcgccggatgacctggcggcgggttgcgcggtgttgctgcgcgccatggtgaacgcggcccagggggatctggcatgagtgagattggccaactgacagcggtgcaactgttgcagcattttcgcgacaaaagcttatcccccgtggaggttactgaagatgcgctgctgcgcatcgagcgctacaacccggtggtgaatgcctactgccatgtcgacccgcaaggcgcactggacgcggcgcaagcgtcggaacagcgctggctcaaaggcgaaccttgcggcgcactggatggcgtgccggcgtcgatcaaagacctcaccttgacggtcggcatgcccacgcgcaaaggctcgcgcacctccagtgccgagggcccatgggacgtcgacgcgcccttctcggccttcatgcgcaaggccggcgctgtgctgctgggcaagaccactacgccggaattcggctggaaaggcgtgaccgacaacccgttgtacggcatcacccgcaacccgtgggacacgcgcactaccgccggtggttcctccggaggcgccggtgcggcagcggcgttgaacctgggcgtgctgcaccagggcagcgacgccggtggctcgatccgcattccctgtgcgtttaccggcaccttcgggatcaagccaaccttcggctatgtgccgcaatggccggccagttccatgacaatcctgtcgcacctggggccgatgacgcgcaccgtggaagacagcgtgctgatgctgcaagccgtggcgcagccggatgcgcgagatggcttgatcggcgcgccaaggaccacgccctggctcgctccaggagcggacttgaaggggttgcgtatcgcctatagccccacgttcggctatgtgaaagtcgaccggcaggtcgccagcgtagttgcccaggctgtggagggcctagtgcaactgggcgcccatgtcgagcagatcgaccccggtttcagcgacccgctggaggtgttcagcaccctatgggctgccggcgcagcacgcctgaccggcacgatgagcgaggcgcaaaggcaacttctggacccagggctgctacgcattgcacaacggggcgagcgcttgagcctggatgatttcaacgcagccctggaagcccgggcggcgctggtcgcacagatggcggctttccatgagcattacgatgtgctggtgtcaccgatgatgccgatcaccgcgttcgaagccgggcacaacgtaccgccgggttcgggaatgactgagtggatggaatggacgccgttcacctacccgttcaacctcacccagcaaccggcggcgtcagtgccctgcgggttggcggcaaatggcttgccagtgggcttgcatgtggtgggcgcgcggtttgccgatgaacaggtacttagggtgtgtcacgcgtatgcacaggcattccccacagcgcacttgcacacaccgaaaatcccgacctgaaatacctacaactgtgggagctggcttgcctgcgatagcgctggttcaatcagcacattgacctctgacacaccgccgtcgcagcttctacacaattttgtaggttgtagcagccaacggtaaccacgatgcgaagcgagccgctcttgatctgcttttgatcttgatctcaggcgccccgttaaaccacgctggccggaattcgacagggatttggggggnnnnnnnnnnnnnnnnnnnnnnnnnnnnnnnnnnnnnnnntttgcaaagtgagccgccgtcagggcggaaccctaagtggccgttacctaaataacggatatgtacgcgctctgatccaacatcccagttgactgtcaggccgtcttcgcaggcaagccagctcccacatggatcgcattccaatcctgcatcgctctacaatgcccctattcatccccgggggcttcatggacatcgaactggcacgcaccttcctcgaaatcacccgctgcggcagcctggccgcagcggccgagaaactgcacgtcacccagaccgccatcaccgcccgggtgaaaaacctggagaaccagctgggctgcaccctgttcgtgcgcaaccgtgccggtgcgcggctgaccgccgacggcgaggccttcgtggtgtatgccaaccagttgctgcaaacctgggaagcggcgcgccgcgacctgccattgccagacggctatcgcaacgtgctgcatatcggcggtgaagtcagcctgtgcaacccgttgatgctcggctgggccaaggcgctgcgcgaacacatcccaggccatgcactgcgcaccgaagtgcgtgagggcgagtacctgctgcgccaactagagctgggtgtgctcgacgccgccctggtgttccagccgcaatactggccgggcttgcaggtggagcaggtgctggaagaaaagctgattctggtgcaactggcgagcaaacccgagccttacgtgtatatcgactggggccagggttttcgccagcagcacgacgccgccctgcccgaccgtgcgcgcgccgcggtgagttttaacctgggaccgctggcattgcagtacatattggagaatggcggtgctggctacttccgcacacgggtggtgcagagctacctggacagcggcgtgatgcagcgcgtgcccaaggcgccggaattcagcttcccgacctacctggtgtattcacgggcgcgggattcggcggtgttgcaacaggctttggagctgctacgtacagtggtgaaggccgaaggcgactggtcgcaacgctgggacccgctgatttgaatcactctacgcctgcgcacatgctagcctgctggtgtttcccctcgcagccttaccgatgaacaagaaaaagtccgtcaccatcagcgacattgccaaacgggtcggcatgaccaccattacggtgtcccgggccttgagcaaacccgacctggtcaaacccgccaccctggcgcgcattctggaagtggcacgcgagctggactacgtgcccaacgccttcgcccgtgggctaaagcgcagtgaaagcctgatcatcggggtcatcaccgcttcggtggacaacccgttctacagcgagatgatcaaggcgatttcccgcgaggcgaaaaagcacggctacaccatcatgctggtggacaccgatgagctggaggaattggaaagcaaggcggtggataccctgctggggtatcgcgtggcggggatcatcctctcgccggtctccgatgaaccgagctaccaacccgactatctggagcgcctgagcaacggcaagaccccggtggtgctgctcgatcgcaccatccacgacagcccgttcagccgtgtggtgctcgacaactaccacagcggcttgcaagccgcgcactacctgttacgccaaacgcccaacctcaagcgcctgctggtgctgaccggccccgagcactcgcgcatcagcgtggagcgcctcaaaggcctgcgggaagtgctggccgaacaccccgacattcaggtcgaggtgcaggcgggtgactacacgctgatgccggcttacctgcataccctcgactacctggccgcacactcggcgccggacgcgatcatgggtttcaaccagttgatcaccctgggcgccctgcgcgcgttacgcatgcacaacattgcccatgacagcctgaccatctgcggcatcgaccgcctgcccttcgccgatatctttggcgtgcccatcgcctgcgtggcccatgacgcgtccctggccggcagcagtgcggtgcgcctgctgctcgaccgcctgcaagacccgtacaagccacgggataaagtggtcatcgccgggcagctggaaaacggctagcggctggtgtagccgccgtccaccggcaggctgacgccactgatcatgctcgccgcgtcgctgagcaggaacagcaccggcagcgccacttccgccggttgcgcaaaacgccccaacggaatcgcagccagcgccgggtcgcgcttggccgggtcggaccaggccatggttgccatcggcgtcaaggtcacggtggggttgacgctgttgacgcgtatgccaaaacggccccactcggcgcattgcacacgggtgattgcatccagcgcggccttggaagcgcagtagctcaggtgatcgtccagcgccaccaacgacgcctggctggagacgttgacgatgctgcccgccatgttcgcctcaatcatcttcgccgcgacccggctggccacttgcgcagcggcgcgggcgttgacgttcatcacctgatcgaaggcgctggcgctgatagcggcggcgggttccaggcgtgaaatcccggcgcaattgaccaggccgtgcaggagcggcaaagcttgcagggctttgtcgagggtgatgttgtcagcgatgtccacgcacaaggtgtggcaactcaatgccgccaaggcttgggcgtcgcgaccgagggcgaagacttcggcgccgctggcgatcagttgctgggcaatttcgcgaccgatgccgctgctggcaccggtgacgaggatgcgccggtgagagaagtcgaaggtagtggtcataaataaagatctcaaaaccaatgaagatccactgtgggagctggcttgcctgcgatagcggagtatcagtctccttatcgggtgctgatacaccgctatcgcaggcaagccagctcccacatttctggaccgtgttgaatcaggtggtttgcaggttgtgcatgatcggtttcagagccgggtacagcttcaggtactcggcaaacgcccggtcataggtcatgacattctcccgcttgggctgcgcccgcagttgcaactgcacccagccggtgtccatctgcccatcactcaccagccccacggtatgcgccgccagcaacgccgcgcccaaggccgcttctacctcctggacgatggtgtacaccgggtagcgtgtgacatcggcgatgatctgcatccaaaggtccgaatggctcgccccgcccaccacaatcaggcgtgggtccagggagtgcgcgccttgagtacccgcttcgatattgtggcgcagggcaaaactcacgccctccagcaccgcgcggtacaggtgaaagcggctgtggtagaggttgagcccgacaaaactgccgctagcgcggtcatcccataccgggctgcgctcgcccatcaggtaaggcaaaaacaccacgccttcgctgccggccggaatattcatcgcgctctgctccaacagtgccaggctgtcttgccccgtggcctgggcctgctgttcttcggcctggcagaactgctcgcgaaaccagctgaccgaggccccggcggtgatcgcaccgccgaagatgtacaggtcgtggtggccgttgtagacatggggcatgctcaccaaaccatggcgcgcatccacctgctggttcaggtagccccagcacatgctggtgccgatcatcgccacatgattgcctggctgagtgacacccgccgccagggtcgccatggccgcgtccacgcccccagcgaggatctgcgtgcccgcctgcaaacccaggcgggcggcccagtctgcaagcaaaccacccaccacctcgccggaatacagcaaccgctcgggcatcatcgactgcgcgatacccagcgcctccagcatctcgcctgaccagttgcgcgccgccacgtcgtagacaccaccgatattcccggcgctgctgtggtccaccgccaactcgccggtcaggcaccagttgatgtagctgttgggcggtaacaggtagcgggtatccgcccacacctgcggttggtgctgcttgagccagagcattttggtgaagccgtagtagctgtctaccgagttgccggtgatggcgaacaagcgctccaggtccacgtgctcgcgcacccaggccacctgctcgccggcgcggcggtccatccagatcaggcacgggtgcagcggcgtcatctgcgcatccacggcaatgcccgaaccaccgtacaaactgctgatgcacagcgccttgacctgcggcgccggcaccccggccttggccatgcactgggccacgcaggtttggacggcatccagccacacctgcggccactgctcggcccagcgcactttcggggtgtccacccggtagccgtggctgtgctgggcgatgatcgtgccctgggcatccacgagcagcgccttggtgctttgggtgccaatgtctacaccgatgacgtagtccatctcagagcaccggcttcaacagcaccttgatcgacttggtcgaattggccagttcaaacgcctcggcccagtcgtccagcgggaaatcatgggtgacgataccttgggaagtgaccaagccacgctcgaacaggtcgatggcgatcgggtagcaatacgggcccaggtgcgcgccgcgcacgtccagctccttacggtcgccgatgatcgaccagtccacgctggtctcggcgccaaacacgctgaactcgacaaagcgcccgagcttgcggatcaggtccaggccctgggtgacgccggccgggacgccggtggtttcgatgtagacgtcgcagccgtaattctccgtaaggccgttgatgatctcgcgggcgttgtcacgggcggggttgatcaccacatcggcgccgaactttttcgccagttccaggcgctcgtcgaccatgtcgatcaccaccagttttttcggggtcttcagggcggctacctggaccatgcacaggcccagcgtgcccgcaccggcaatcaccaccacgtcgtcgagctggatatcgccacggttgacggtatggatcgagcaggccatcggctccaccagcgccgagtcttcaagggacaccgattcggggatcttgtgcacgatggcggtcttgggaatacgcatgtactgggccatgccgccttcggccacttcgcgctggaagccgaagatgttgtgcacttcgcacatccagtatttgcctgatttgcagaagcggcacttgccacacggcacgatctgttcggcgatgaccttgtcaccgaccttgacctcaaagtgctcctcggcgccctcgccggcttcgaccacgtagccgaaaaattcgtggcccggtactaccggcgccttgacccaggggttgtcgccgccccagaacatcgccgcgcccgagtggcacttgcagtcactggcgcagatgccgcaggcggcgatacggatcaccagctcattggcacgcgcctggggtttgccgatgcgctccaggcggtagtctttcgggccgtggcagacgacggcttgcatgtgagtgtgcttgtccatgtgttcggtcctgtgtagtgaggtattaacgatggcgctgacggctgataaaaatcgccagcaaaatgatcccgcccttgattacgctctgcacgtagggcgacacgccaagcatgttcaaaccgttgttcaacacgcccagcagcatggcgccgagcaaagtgccgatgatcactccgcggccgccggcaatcgacgcgccacccagcaccacggcggcaatcgcatcgagttcgaacgacacaccggcattcggctggccgctcatcaagcgcgaggtaagcaccagcccggcaatcgcggcggtgaagccgctgatgccatacaccagcagcttgaaacgcgccgctcgcaccccggacaagcgcaccgcttcttcattgccgccgatggcgtagatgtagcggccaatgcgggtgtgttgcagcagcacataggccgacaggtaggtgatcagcatgatcaggatcggcacctgcaggccaaacacactggcgcgaccgaagaacgcgaaccactctggcaagccggaaatcgggtagccgtcggtgtacatcagcccgaacccgcgcgcgatgcccatggtcgccagggtgacgatgatcggcggcatgtgcaggtacgccacgaacagcccgttgccgatgccgaaggccacgccaaccagcagcccgacgccaatcgccaggcccggcggcaacccggcgaccatcagcccggcagtcaaggtgccggacaacgccatcaccggccccaccgacaagtcgatgccgccagtgagaatcacgcaggtcatgcctaccgcgatgatcgcgttgatcgacacctggcgggcgatgttggagaggttgctggcggtgaggaaggtgtcgctggcgaggatcatcaccagggtcaccaccaccagcccgacaaagggataaaacgcgggcgagcgcagcagccgcgccaggttcaggcgcaaccggccggtgccggcggtgttaatggacgtattcacttgagccccctgttgcatggcgcatgacctcttgaggattgacggcggacgcttccagtaccttgacgatggcgcccttgtggaacacggcgacgcggtcgcacatgccgatgacttcgggcagctcggaggaaatcatgatgatcgcgtagccctgttcggtgaggctgcgcatcaacgcgtagatctgcgccttggcccccacgtcgatgccgcgtgtgggttcgtcgaacaccagtacgtcgcagtggtggttgatccagcgggcgatcacgactttttgctggttgccgccgctgaggttcaccacaaggctttcgccactgggtgccttgatcgacagctggcgcatcagcgcttcgacgctggcgcactcgcgggccttgtcgatcaggcccgaggcgttctgatacttgggcaaattgttcagcgagatattttcgcgaatgctgaaggcggtgatcagcccttcgctcttgcgactttcggggagcaggccgatgccgtgggccagggcttgggccgggtcatcgaggctgactttttgcccgcgcagccacacgtctttgctcaccgtgggcaacgcgcccatcatgcccagggccagctcggtgcggcccgaacccaccaggccggcgaagcccaggatctcgcctttgtgcacattgaaacggttgtgggggccgttgcgcaccagttggatgtccttgacttccagcagcaacgggccgcgttcgccgctgggtttgggcggaaaactgcattccaggcggcggccgaccatcatctcgaccaggcggtcgatgtcgctgtcggccacctcggtgacgcctgcattgccgccgtcgcgcagcacgctgatacggtcgcagacctggaaaatctcttccaggtggtgcgagataaaaatcaccgccacgccctggcgcttgagttcgcgcatgatgtcaaacagcaactcggcctcactgggggtcagcgtcgcggtcggctcatcgagcaccagcaggcgtgcgtccagggccagggccttggcgatttcgacaaactgctgctcggccacgctcaggtgcttgaccgcgcagtgcaggtcaatgctgacccccaggcgcttgaacaacgcctgggaggtctcggccatttcgcgtttgcgcaacaggccgaagcggttgctcagctcatggccgagaaagatattttctaccgccgtgaggtagggaatcaggctgaattcctggaacacaatgccaatcccggcggcaatcgcatcccgataggtcgcaaatgttcgagcctgcccgtcgataaggatctgcccttcgtcctgatgctcgacaccgcccagaatcttcatcagggtggatttgcccgcgccattttccccgagcaaggcgtggatttcgccacgctccacttgcaggttgatggccttgagggcctgcaccccagggtaacgcttacagatgttttccagcttcagaagactgctcataccgccgacctcgcactcagaaggaagacctgggccccacgcattgcgtggggcctggggggtttaccagctgaagtccttggccttggcctggtcgatcagggtgatgtccaccggcacgctggccggtacttgggcgccccacttcttggccagggcgatgcccagggcgaggcggatctggtcgcgcgggtactgggccgaggtggcgatgaaatggctgccgggtttctggatcgccttgatcgcttccggcgcgccgtcgacgctgaccagcttcacgtccatcccgctggcttcgatggccgagagtgcgccaagggagccattgtcattcacgctgaaaatgcccttgagggtgggctgggcctgcaacatgttttcggtgacagtcagggcctggtcacgctcctgcttgccgttctggatgctgacaatcttgatatccgggtgcttggccaccgcctctttacagccgcgcacacgttcgaggatcggcaccacggcgatgccgtcaaggatggcgatattgcctttgtcaccgatggttttagccaggtattcacaggcctggaaaccggcgtcgaagttcttcgagccgacgaacgaatccagcgggccatctgcctgggcatccaccgccaccactacgacgccggcagcatgggccgacttgacggccgattgcacgccgacggagtcagtggggttgatcaacaggatgtcgatgcccttttgcagcatgtcttcgacatcactgacctgcttggacacgtcgtggcgggcgtcggtgatgatcagcttggcaccgatggtggcgccggcttcttccagggcgtttttcatggtgacgaaataggggttgttgatttcctggaacgaggcgccgatgcggatgggcttggcagcgtcggcaaacgcgggggtcgcgctgcccagggtgatgctggcagccagtaaacacagggttttggggagcattttcatggcatgggtctctgttttgtttttatttttagagcaaatgttatcgttaacattttgtcagaaactaacaagtaaatctgacctgtgcaagcctccactggtcggcagtgatcaaaatgtgggagctggcttgccctcctgttgtaggagcgagcttgctcgcgaaaaactcactggcgccgcgtttattcagaagcccgcgttatcgttgacatttttcgcgagcaagctcgctcctacagggggcaagggttgccagtaaaaactcgcacatccgcctaagccaactaagctcagcctcaaataaaaacacagcgagcagccggccatgccccacccgaccgagactttccgcgaccgttaccgcgcaagcgtcagcccgcgttacaacccctggctgcatgccgcattcgtgcttggctacggcatcgcctgcatcacgctggcctggtcgtccactgccgatatcaccgccctgcagtggctggccgtgcctctgaccctgctgttcttcaacctgtgcatctaccttgtgcaccgccatctgggccaccacaaacatgcgttcgcacggctgttctacgcacgccacactggcgaccaccacagcttcttcacccctgatcacatgacttacgacagcccccgggactggcgcgtcatcctgtttccagcctggctgatcttgctgcacagcctggccatcaccctccccgcctggtggctgctcagccaactgagccccaacgttgccgggttgtttgccggctgcatgatcctcggttacctgctctacgaagtgtttcatgcctgcgaacacctgcctgccgaacacccggtggcgcgcctgccgtggattcgccagatgcaccgcctgcatgccttgcatcaccgtcgtgagctgatgcaggggcgtaacttcaacatcgtgctgccgttgatggactatttgtttggcactttgcattgggaacccacggtaaaaaaaaggggcagtccaactggactgccccccgcttcacacacatagatcaatcagcgcacgatggtctggctgcagatgtggccgaggctgacgtattggacgttattgccacccacgcccacacctgggaactccctgagctcaatgcgccagccgccctcattgaaccaggtttcccagttgtaggtctggcccgagccgctgtccgggtaccgcactttgtagtccccagagcaggtgcccagggcgacattccccgaggctgcaccggtgatgccggtcttggcctcatagtcgacccagttgtaagtggcgccaaaatgcttgtcgacccgtagtacaggggtgacgccgcgcaggggctcgcccgtgctgtctgaccactgggtgctccagctcagattgcgggccgcctgggtggccagttggaagatcgagctggggatgcgcaccacgttatcgccgttcacattgtgctggttcaggcgtggcgccgagccgagggtcagcttgtattgagcctgggggttcaatgctaccgccgggttggcccgcacacgcaccttgaccgtgtagcctggcgtcaggttgggataggtggaggtagagccctgcgggacttccacccactgggtgccatcgaaccgttcgaagatccactggttacgcgtacccgcaccgtcatcgcccaggaacatgcccacaccttggccacgcaacgagacgaaggagaagtaatccacgtcattgacgctgtcgaggttaccggtcacctggttcaaggcatccggcagcgcgaacgcggtttgctcagtgtcgttaggctcgtaggcatccacattgctgtccaccgccacaccaaaactgaactgcgagttgctcgcgacattggccaccatgaaccagtagtagtcaccggctggcaacacgccgttgaggtattcatcggcactgccggggttatccgaggtgcccaacggcgtcaggttgccttggccgtcgtcatggaacagcgtcaacgacatatccgtgccggcactctggttcagcagctgtacctggattcgtgcgtttttcggcaggttgaagtggtaagcgatttgcgcgccggtctccacaccggtgagggtgtaaagagtattgatatccagggtgggaaacaacggcgtgaaggctgcaaccgcggcctgtttcatgtgcgccgagtcaggtttttccagctggccaaccggggagtcaatcgccacattaccgacggccgccttgctttttttgacgacgttggactgcccggccttggcggcattgagcttttgcttgagctcgcccgagacgctggccttttccagcgtaccgccaggtttcaacgctttgtccacggcctgcttgaccgcctgcgcgctgagttttgccggggtttgctcggccagggcaaaggccgaaacgaagcaagaggccgccatggccgcgcccagaatgaaggcttttttcgatttcattttttatccatccatagttaaaaaattgaagctcaggtaaccggtgacatccggtcacctgggatggactgtaggacaagactgtatgtatgtacagtatttttttaacaatgtgagcctgaaattcaggctcaagaagcgaaagtacctctaaagccaggtgcaccaatagccccaactgatcgcccaaattatcgcgagccgatagggccatacagcccaacgcttgagcgctggcggaatgacggctagctctgcctcggtcatgtaaccttctttcacggagcgttctggcgcgcggaggatatcaatcatgagacacatgcgatggaacctgacgaaccgctggtttcgtccccagcgttgctgatagttacgcacctgcacgttttcaatgaagtaaccttccaacgcctcgagttttgttcgttcgacaaagagcactaatcccaaaatgacgaacgctccaaccaccatcaccagggtgtaagcgagaaaaaacgacattaacatgcccttttggtgaaaaaatcgaatcactcttgatctataacgccccgtaatgaccgcctccaggttcgcgcaccgctaccaattgccaattcaagaggtgtttttcgcgagtgaggcctagtttcatggaattgggatatcgcaccatctgcgccaaacctcccacacaatgatttcgatgatacaaacatccgcgaggcgatacggccacaaggcccagcgcttaagcgtcaaggggacagacgccagctcggcttcggtcacaaggcctgccttcagaaaagctttcggacctgacaggatgtcgatcatcaggctcatgcgatgatatctatcgatcggatcatatccttccctgaaacgcttatgcctaagaaccttctcgttctcactgaagtaactttccagttcatccagctttgcgtattcagcaaacactatcagtacgaacacgacaaacacccaagcgaacatcacaatgctatatacaaaaaaagggacatcgttatgttccctcgggttggaatatcagatcgccgtcgacttccaatattcttccccccaaaaacccaccaaactcaccaaaaaaagcgcctcccgtcgccccgcccatagcccctccaataattccgcaagccagttcaccgttgcctttcagtgaaacacccaatgcaatccggcatgcactgcgagcaatagttgcgccacgcttgcccaaaacagcagccccaaatactccacccagcaacctccccgtctccacatacttcgcccgccgacactgcacctcccttcccaccacacacgcctccttgatttccaaacccgccacgcctacatccaacgccaacccaagatatgttccttgctttaaccatttcgacatttgcgtaatcgttcgaacccgctgcgtgtaccccgcaatctcgccttgatgcagatagcttttggtcgagatcccgagcgctcccttcagcggttgattgccacgcaaccccgagccaaatcgtgcagccccttgcagttgcatatccaaaacgccaaacatcctttgacgctgtcgtataaacgactatttgtccaaaccaccgtccttcaattggcgatgcagttgctcgatttccatcaaagtctgtgcaaccgcctgcaggtgccggctccaagccgacgtcgcactgccgatgcctatcgagccataccccagaatgctctgcgccaggtcatagtttttgtttccagctctatcgaggggcgcaacctggtccagttgatgagtaatctcttcagcgtggcgcatcaaccaggcttcttcgatagaacaattgacgctggacgcctctggaacaatcaccaactcacccggcctcaccaatccatggctcaggtgccgattcagcacatcgaaatgatctcggccttgcaacaagcctccgcgtcatagacgtgatttcaaaaacgggtaaggtgcagcctgttgattgatgtagccgtacgccatgtcctggattccgataccgagagagatggcatcgaaatatatgcaagcacccacagcccggacacaagcaggcgggggtcaaaaagtacgtttgggaagttgcctacacagcaaaagatgaacgcctacagaaagcgtccctaataccccgtcatctccaaataccccaccccaccctcaaaccgcaccggcccttcccaatatggaatgcccaggtccatccacgctttggggttgacggcttcggtggtgatatccagctgtttgccgggaattttcagcgaccaacgtgtgggaatgttgcgcccgtcgatggccgtggtggtcagcggtgtgagttggatatcgctgttgtgcaaggtctcggtgtggccctgggcgtcgatccaggtgccggtgaggtaaccgtcactgtctttctgccgcacgcgaaacagcatcagttgcgcgccgcggtccaggtgcagggagaaccagtcccagccggtctggctggcggccaggggttggctgctccactcgcggtcgagccaggctgggccgctgacctggtaggtgtggccgtcgaggctgacgctgccgctggcggtgaaaaacggctggctgtagtagtacgacgcctggccttggtcggatttgcggctgtagccatggtcgccttgcagcaccagcgggcggctggaggtcaggtgcaggtcgtaggcaaattgtgcgccactggccttgagttgcatgtcggccagggggctggaagcaccagggcgggtggcgaaggtccagtcgtcgatccaggcgttgaacggctctgcctgagccccagcctggccgacgccaccccgggccaagcgttcggcggcgtagtggcgggtggctgaggtgacggcggcgtggccgagccacacggttgaatcgcgccagcccggttcaacagggccggccttcaacgcattgcgaaacagcgtccattgcacgccgaagacattgccctgggcatccttgaggttggcagtgacgtaccaccattcgatgcgaaagccgtcatggggcccgtggtcctcgggaaagctgaagactttgccgggcaccacctgggcaaagtccgccgcatcgctgcccagcccggcgaaactgtcctcgggtgcgggcgcctggtcgcacccgctcagcagtaaccaggcgatgcacgccaatgccttagtcttcatgggcgaacgtcctcaacaaatccgccgggcggctgcggtacagctgccagaggggccaggccgacgcaagcaaggtggcgagcatcgccagccccagcaattgcgcaagctggccggggaagacttgcagcggcaggcgccagccgaaggcctgcacgttgatcaccgcatccaggcaccacgccagcaacagccccagcggcaacgccaggatcaacgtgagcaccgccagcagccaggtctggccgaggttgagcagcatcaattgtcggcgcgtcacgcccagcgcccacaacggcgcgagttggcccaggcggctttggctctgggtcaacagactgatgaacaacgccacaccagcgacgccaagggtcaggctgttcaacgccgcggtggcggcgaaggtgcgttcgaagacctggctggaccagcccttgagttgctgttgatcgacgatgcggctgtcttccagggcgaactcccgctgcacttcacgaatcagcggcggcacatcggcaggcgccacgcgcaggttgaagcgtgccggtgagagcgtcggccaatgcgccaacaggtgctgggcattgaccagcagatggcccttggggttgccgtagtcggcgtagatgccgacgatcttcggcgcccaggtaccctgcggtgtggggatggaaaccgtgtcgcccagttgcaccttcaggcgtcgcgccagttgttcgctgagcatcaggctgtcgtcttgcagcaggcggtcccagggcgcatccgccgcttccagcaacggccagtgttgacgataagtggggttgtcgaccacgccgaacacctccgcgggccagccttgcagttgcaccgacacctgccaggcgggcaatacggcctgcaccaggggctggcggctcaaccatgcattgagttgctcggcctgctgcggattttgcgggttgaggtacagctcggcggtgaggcgctgctccagccaatgggtgaaggtctggcgaaagcccgaggtcatggaaccggcgccgatattcgccgccagggccaacagcaacgccatcaacgccaggctcaaggccggcagttgctggcggcaatcggccaggaaccactggcccagcaccgagcgaccgcgccccagcaccgctttcaataaaccgtttagcagcaccggtaacgccaacgccgcgcccaacagcaaggccgccatcagcacaaaaccggcggccaggctatcgcccagccacagtgccagcaatgcgatcagcaaggcggcggatgccacccagccctggcgccgtaaccagcgcccatgggcttgatgccaggcctgggcgttggccagcgccagtaacggcaaacgcgccgcgcgccacaggctgctggccccggcgagcagtgcgcccagcaggctcacgcccaaaccagcgagccaccaccaggggctcaagttcaattggccggcgacttcggcgccgtacaggccgcgcaaactggcggcgacatccggcagcagcaggctggccagcaggtagccgctggcgataccgagtacaccgctcaacacagccaaagcgcccaattcgaggcccaggctcaggatcaacaggcgtgcgctgactccacaggcgcgcaaggttcgcagcaggccacggcgctgttccagggccaggccgatggccgcatgcacgataaacagccccaccacaaaggataaaaaacccactgcatccaagttcaggtgaaagctttcagtgagacgtgacaggttgttgtcctcgccctgcttgagttgcaacgcggcgggtggcgtggggtggcgcgcggcgaaggtgttgtccaccagtaagcgcgacaggcgcccaggcatgttgagcaggggttgggcaaaactgatatcggtcagcagcaggccgggcgccatatcggcctgtacttgcaacggtggcaggcgctgcccggtggacgtcagcggctgctcgcccgcctgcaaccccagcgcctctaacgtttgcgcagcgacccaggtacgccctggcggctcgaaaaacgccagcatctgcgcctggctcaagcgttgccctgccacgctgccgctgccgggcaacgacaccgggtcgatacccatcagttgcaggcgctgctgctcgtggccttgaagctcaacccggccctgcaccaccggggagaccggccagccggcgcggcgcagctcggcaaacagtgcttgggggaaactggcggcgtccggcgctaccaggctggcttgaggttcgccaccgatcaattggctggcgcgtgcgtagctgtcccgcgcctggctgttgagggcctgcacgccggtcagtagcgcggtggccagccacaggccggtgagcacgctgaaaaattgcaccggatggcgccgccagtggctcagcaatgcgcgtagcgtccagtaaaacagcgccatctcagcgagcgtccatcggcacgacacggccacggtgcagcatcacttgccggtcaagccgtgcggccaggcgcgggctgtgggtgaccatcaacaggctggtggggctgtcacgcagcaggtccaacaacagttgcagcacttcatcgctggtggcttcgtcgaggttgccggtgggttcgtcagccagcaacaaacccggtcgcgaggccaacgcccgcccgacggcaacccgttgctgctggccaccggagagttgctccgggtaacgccgtagcaagtcgcccagccccaggcgctccaccaattgcgcttgccagtgggggtcgaaacgtccggccagccgcgcctggaacgccaggttgtcttccacgcgcaagctgccgatcaggttgaactgctggaagaccaggccgatttgcgtgcggcgccaatgggccagttgcccttcgttgagttggtcgaggcgctgctcgccgatgcggatgctgccgccgtccactcggtccagcccagccaccaggtgcagcaaggtgcttttgccgctgcccgattcacccatcagcgccaggctgctgcgctcgcccaggtgcaggtcgacgccggccaggacggccagcgggccttgcggggtcgcgtagttttttacaacaccttgcacctgcaacataagaacgctcatctgaaggacccgcaatgagaataacggctgatgctcctgcccacgcaaatttttcacatggatttcaccgcccgaccatccaccgcactttaaagtgcccgccaactcgtggtaacccgcaactttcttagttaaccaaagtgacactcttaacatgcaagtgttcagcaaaaagacagcagtgctgtgacagtctcctgcctcactaagggcaactgcccagccgtgcagcctttttataaacacaataaacagtgccgaggatgaaccgcgtggcagacatgatcctggccaacccccaacccaaaaggtcaaggttaaaacgcctgagaaaataccgcctgcacttgcttggcatcagcgttaccgccttgctgttggcgggctttttaatgtggcccagctcgcccctggacctgggcgtaggcaatcgcctgctgacctccggggtgctcgccagctggcgagagggtgaactggtggtgctggtgcgccatgaagagcgttgcgaccgctcggccaacccctgcttcggccccgctgatggcctgaccatcaacggcactgaacgcgccgtcgaactgggcaaagcctttgattcactgggcatggccctgaccgacgtgctcagcagccccaccacgcgaaccgcccagacgtcactgttcatgttcggcaagaccgagctgtcccccggcccgctggccatctgcggcgacgccatgggcgatgagatcctcggccacaaacagccgggacgcaacctgatgctgatcacccacagcgcctgcatgagcgacttccagaccagcctgggcttcccccacgcagccgccgccgagtacggcagcgcactgttcgtcaaggtgctgcccaacggcaccttcaaggccatgggcaccatgaacagcgaagagtggaccgccgcactcaaacaactttaattacacttgtttacatattaagccacgacgtgttcagcaaaacgacagccctgttctggcatgtttagtcgcgcctgttagttatgttttcctacaactacttagtgacccttacgatgcttcaccctattaagttaataccgccattgcccgtacttgaacgttatggagcgatgtgcgcatgccccgcgtaaaccctctggcctggctattgctgggcgttgccgtgttcatcttgctgcccctgggctttcacggtttatggacgccagacgaaacccgctacgcccaggtcagccaggaaatgctgatgagcggcaactgggtggcgcctcacttcatgggcgtgcgttatttcgagaagcccgcggccggctattggttcatcgcccttggccaggcggtgttcggtgaaaacctgttcggtgtgcgcatcgcctcggtcctgagcacaggcctgagcgtggtactggcctacctgctcgcccggcgcgtgtggaacgacccgcgcaagagctttgcctgcgccctgctctacatgagctttggcctggtggccgggcaagccgggtatgccaacctcgacccgcaattcaccctgtgggtgaacctgagcctggtggcgttgtggtttgccctggactgccgcacgccacgggaacgcctgggtgcctgggcagtgttgggggtggcctgcgccatggggttcatgaccaagggttttctggcctggctgctgccggttttgatcgccgtgccctacctcgtctggcagcggcgcgtcggcgagttgatgcgctacgggccgttggcggtgctggtcgccgtgctggtatgcctgccctgggccctggccatccacctgcgcgaaccggattactggcatttctttttctggcatgagcacatccgccgctttgccgccgacaacgcacagcatgcgcggccagtttggttcttcctgccgatcatggtggtggcgtgcctgccgtgggccgccttgctacccggcaccctgctcaagacctggcaggaaaagcgccagccggcgattacctttctcgccctgtggttgctattgcccctgggctttttcagcctgagcaaaggcaagttgccgacctacatcatgccgtgcctgttgcccctggccttgttaatgggccacggcttgatcgacctgatcaagcaaggcaaggcgcgcccactggtcatcaacggcgcgctcaatttcgtccttggcctgacggccatggtggcgctgatttacctgcaaatcacccgcccgctgtacggcaatagccacgcagagatgttcaacctgtcgctgacgtttatcgtgctgttgggctggatcctcgccaacctgctgcaagcggtgcgcccgttgacgttgtgggcgatgcccgccctgggcattggcttgctggtggccctgctaccggcgggcatgccggccctgatcgaagataacgaaatgcccgaccaattcgtgcaggagcatctggccgaactgcaacctgtccgtgctttgctgagcaatgacctgggcctggcatcggccttgacctggcgcctgcgccggcccgatgtggcgttttataacacccagggcgagctgcgctatggcttgaactaccaagacgcggcacagcgcaaagtcacgccggacagcgtccaggcctggttggccgaggcccgccagcagggttcggtcggcgtgctgatgcaggtcaagagcaccagcgaacaccgcgaagaagggcaattgcctcccggtggaaaacgttatcgcaagggcgacctggtgctgacgatttacccccaacacccttgaatgcagcgcctgccacagggaacatcccatgagtttttggaaaaccgaacgcggcgccctggtgttactgctgggcacctcggccttgctgctcttgctgggcctgggcagccgcgacctgtgggggccggaaacgcgctgggcgaatatcgccttgcagatgctgcaaagcggtgattacttcgacccgtatctcaaaggcacgccgtattacgacaaacccctgccctcctattggctgatcaccgggtttgcccacctgctgggcggcctcggcccctggtcgctgcgcctgtcatcggtgcttgccgcgtggttgagcatctggctggtgtacctgatcggtgaacgcctgtttcgcaaaggcaccgggctgatcgccgggtggatgctcgccaccaccttctatttcctgttctgggcccgcgtggccaccgccgatgtactgactgtgtgcggcgtgctggcagcggtgtggtggtattggcgcgggccggatgacacacggctggggcgctacacggtgtttttcctgttgctggccgccacctcactgttcaagggcttgatcggtgtggtgctgccgggcctggtgctgttgccacacctgctcagcgaacaccgctacaaacaccacctcaacctgcgcatggtgctggccctgctcatcgcaggcatcgtgtacgcaattccctttgtgctgtcccaccgctacggcgcccccacttacggcgagagcggcctggaactggtgttccgggaaaacgtggtgcgcttcttcgaccccttcgaccatatgggaccgatctacacttacctgatctacctgccggcctacaccctgccctgggcaccctgctggttactcggcctgtggctggccgtgcgcaactggcgcaaggcgccgcccaacgtacgctggctggtgtggggcctgggccttttatttgtcttcttcaccgccagcggcagccgccgcagctactacgtgttgccgctggtgccctttgcccaactgctcggcgcctggtggctgagcgagcgcctgcacaaaaaaccttcgagctgcccgcgctggcaaacaggctttggcttgagcgcaggcctgctcttgctggtgctgggcgtgatctacccctggaccaacggcaacggcggcgtcacccgcttcgccaccgatctgcaagcccaggctgagaaaagtgcgccctggaatcaatggcaactggtgctggtagaggtcgacaacaagctgcccatgtacctgcaaaaccacggcaagcccttctattacgtgagcgaagcccaggacttcccgcgccaaggcgacagcgccgcgttcatggcctggctggaaaaaaccagcggccaagggtttgatccgcaacgtacgataatcgtcgcgcagtattccaaggaagagccgacgccgttggcgtttctggcggtggatcatcaagtggtgacgacgcaaccggataatggggagcggttgttcaaggcgcgtgagggtgggagtgtggcgtttgttccagggacgcgctgaggcactctgcttgctggccttttgtcatggtttgtaaagggccagcaagccgtgtccctttaaattgcaggacgtttccgagacaatccccgccgccttgtgccggttggaatcggtggctagtctgcggtccatcactgctcatcagtgatcgggtttagtcgctcgggtttcatatggcgcatggttccatgatgtttcatggtggctgtgcgtatgggcgccttcgggcgcgccggtttgccatgtggccggtcgactaacctgcgtacagccgccacccattcgtttagtcgcgaggggtgtcagctccaaaccatgtggagttacaccatgaataaagtcctacccgattcacccctcgatcctgcaaaagaccgtgccgcgttcaaccgcgccatcgaccattacctgcccagccagggtttccacaacgtcaacgacgacctgagttttgaagatgctttgctctacaccgccagcctgctcgacagcgcttcggcaacggcgctcgattgcggcgagctgctggataacccagggcgggcgaagattctggcggtgtggcatttgttggagattgccaagaccacggtagatcgctctattgagtgcgtgaagcctttgaagccaacaacttaaaatgtaaaagcgggcttggccccattttgtaggagcgagcttgctcgcgaaaaactcacaggcgcggcgtttattcaggaggcacgcgttaccgttggggttctgcgcgagnnnnnnnnnnnnnnnnnnnnnnnnnnnnnnnnnnnnnnnnattcaggaagcacgcgttatcgttgacgtttttcgcgagcaagctcgctcctacatttttggggttgccacccgatggcaatgctgcctatatttccgcctggcgctctctacgccaccttccgcggaaagggctgcgcccaagacatcccagctccacccatttctacgactcccaaccttgaagcggaaaaggtttgtgcaaggagctcgtatgtcgcaacgccctttagcctccactaccaatggccgcctcaaccttgagcagcagcgcaagcgcgccaaggaactgttgtcgcagctgaaaagcctagaccccagcgcaaccttgtcccaggctcaatggcaggtagccaaacagctgggcttcgccagttggcccaagctcaaggcccacgtcgacgccctcgactttgccgcccgccaccctggtttcgatgccagcgatgaatcccgcaccacccactggcgctgtggcaacgatattgcccacagcctgcaactggccgggttcaagggacagttccggatgctcactgacccgctgtgcatggggccagtgcgtgaactacccagcgaagcgttccgagcgatgcgcagtacctttatcagtcaggcctttgccattgactccactgaagttgcgcatcgcatcaacgatgaatacaaccaactacaagccttgaacaacgccgatcccagtgtgctgtggtgcgaggcggacgcctacgatcaattgttcctggtccgcgccctggctggccttgagcaggcgccgcgcaagctggagctgattgaggcagaccgaattcccggagtcgagcgatttatcggcataggccaattggcccccgatgtgctggcctggctctggccgcagcggcgcttgatcgacgacgacgcagtgcagttggccaaacgggtctggtcggcttactgcgacagctcaccgctcaacctcgcggaactggcccatggcaatcaccctgccctgccttttctggcaccggcgttacggcgccagctacaggagttgccgggtatcgaggacggtttgtcactgactgaacgtttgtccctgaggtatatcgctgaggccgggcctgtgcctttcggtcgggtgtttgccgagttgatggccaagcgcgagccactgcctttcctgggcgataggatgtttcacgcgctgctgcgcccattgattgatgggacggcgccgctgctgatcgaggccgaaacggacgtggagtggccgcgccgcgtattggcgttgacgccactggcgcatcaggtactggacggcaatgcctgctggctggagcacgccagccatgagcgctgggtcggtggtgtgtgcctgcggccacggcaacctcattgggcactgggccttgatgatctgcccgtctggcgtgactgatgctgcgcgatacgatcagcgcttgggaaacaaccccacggcacatgccaccacagtcgggtcgccctggtagaccgcccgcgggctcatcgaaggctggggcgctcggccgtccacggcgcgcagcatgggccactcagcggtcgaagaactgtgtgccggatcgacaatttccatgcagcgacgcagagaggtgaagtctggcgactgtgacaacgacaggtgcagggtctggctgaccgagaccgacactaccgagcgctgcgcacattgcccgtcatagatcagcgtgtggcggatcaacgggttgtcatggcagtacttgagcaggttgacctgccgcgagtgcaccagcgcagtgttgatgatcagcaggtcaaacgccacaacgcccgagcgtgtcagtgcctgcaactcgtcgaacgaactcaacggggcgatgcggtgatagcccagctggttgagcattttctcgatcttgatccgttgcaaaagctctgcatcggcaatcagaaggcgtaacgctttattggacatagggtaaacctgacagttgggcatccgcgtcgatcattcaacgctgagcaaagtaaccgtcaggggtgaaccctgactttaaggcgattctgaaacggcaatccggggcacaccgtacttttaagaatcgcctcaaagccttcgcgccactcgctacctaccatgggctgcgttcccttacccgaccatggaattaccgtgttcatgtttctactcagaatggtgctgctggcctgcgggttgctggtgcttgcgcccccgcctgccgatgcggcgctgaagatcgaaggcacccgcctgatctatttcggccaggacaaggccgccggtatcagcgtggtcaaccaggcctcgcgggaagtggtggtgcaaacctggatcaccggcgaggacgaatcagccgaccgcaccgtgccctttgccgccaccgagccattggtacaactgggcgccggggagcatcacaagctgcgcatcctgtatgccggtgagggcttgcccagcgatcgggaatcgctgttctggctcaatatcatggagatcccgctcaagcctgaagaccccaacagcgtgcagttcgcgatccgccagcggctcaagctgttctatcggccccccgcactccagggcggctcggccgaggcggtgcagcaattggtatggagcagcgacgggcgcacggtgacggtcaacaaccccagcgccttccacctgtcgctggtcaacctgcgaatcgacagccagacgctcagcgattacctgctgctcaagccccatgaacgcaaaaccctgaccgcgctcgacgctgtgcccaagggcgccactctccacttcaccgaaatcaccgatatcggtttgcaagcccgtcatagcacggcgctcaactgataaatcacggggtatttataccaatgtcactgaccaaacgctgtttacccctactgatatgggcctgcgcggtcctgcccgccaccagccacgcactggcctgccgcgaggacggcaccaactcgatcatcacccaggaagcgctgggcacggcgctggcagtcgccgccgacgcacccaacggcaccatcatttgggaatccggcccgcgctcgaccaatgtcatctgcaaggacgactacctccacggccgtgaggaagtgtatttctatgtcaacccggccagcgtgagtatcggcaccgggatccgcgtgggcattcgctataacaaccaaccgattacccaaagcaccggtaaggtcggtaccggtttcttctccgaccgaggctgcaatttgtccaactgcgtgggctgggacaaggcgcgcttcaccctcaatttcagcgtgttcatcgagaagtacgaccccacgccaccgagcggccaggccagcaccctgacctcttaccgcgtgttccaactggacggcgtgcgcgggctcaactcacgacccaacagtaacttcaattatgtggtcactggcatgaacgatatccgcttcgtgccttgcactcccgaactgaccatcagccccagcgtggtcaacttccccacaccttcgcgcaaggcctcgatcggtgaagtcgccagcagcgcgaacttcagcctgaacctgcgcaaaggttgcgacacgccctataccgtcagcgcacgcttcgccaccacgccgggcggcggcagtgtgaacaatggcctgctggtgccggacaacaacagctcagtcggcatctcgctgtctcgcgccgagagccagcagcaactgcccttcaataactggttcacgctgcaggagctgatgggcctgggccagagccacgatgaattccgcgccgacctcaagtggcgcaccctaccgattcccggagcgttcgacgctgccgtagtggtggatatgtactacaagtaggtgatttttaaggatcgtcttatgccaccggcagaggcccagacgtaaagtctgccgatgcgattgaaaagttatctgctccagatcaaccccgtcctctcccgacccgaagcagccagaaggctgcttcgtatttttgcgagcgtgctgctggtaggcatcctcagcggggtctatacctttttgctgtcgaccttcaacaacgacatctcccagcgccgcggctacatgagcagcgccattgccgaagcccatacctttttcaccaaccgccaagccctgctcgaaagcctgagcctgtcggcagtgcgcaagcagtccagggtctatccgtcctcggccgaagaacaacacctggaattgggcgacacatcgggcaaccagtggagcatctggctgaccgcacgcatgcgcgactacctcaaggccacacagctgaacctactctatgtcaacgccggccccaacccgcaagtgatgcgcctttacgacgccaccgcgcaggtattgccgatttccaaatgtatgctcaaccgcctcaaggctctgcagcacaccgacccggccacgcttaacgaactttggctgagcgacaggactgaacagcactcgcacctgtatatcttcatccgcctggacgagcgtgatcgcgactccggctggctcggcctggagatggatagccgtgaagtctcatcgacactcagcgaccagagcgccggtgagttcatgatgctcaattcccagggcatgctggtgttcaccaacagcaccgatacacagttgagccagcaacacctgaggcccggcgaagacagttttttcggttttgtcggcagcggctggctgcccgaccacctggtgattcgcaaacacctgaagtcctctgaatggcagttgatgtactccatcgacctgcgtgcggtggtcaccggcctgtggaaacagctgctcggttcgctgctgttctgcctgttcagcctgacactgatctggctggtgatgcgccgcgtcgatcagcgtttcatcattccgtcgatccatcgcatccaggcgttgatcgaaagcgaagccttcggccgcgatgtgatccagaccgcgccagtggccctttgcgtgctgcgccgcaccgacggccaggtggtactggaaaacaccctggcccagcaatggctgggtaacgggccggagcgcgaggcgctgcgcgccggctggatcgagcaagcctttgccaacgggccttccgagcgcagtgactactttgaaaccatcgacggccgtcacctgtacctgagcagtgcaccgacccgctacaaaggcgaagacgtgctgttttgcgccttcagtgacatcagtgcgcgcaagcaggtcgaggcggcgctggaagaggcgcggcaatcggcggacgcagccaacgcggcaaaaaccctgttcctggcgaccatgagccatgaaatccgtacaccgctgtatggcgtgctcggcaccctggaactgctggcgcgcacgcaactggatgcacaacaaaaggactacctgcaggcgatcgaaggctcatcgtcgaccttgctgcaactgatctgcgatgtgctggacgtatcgaagatcgaggccgggcagttggcactggagatgggcgagttctcgccgctggaccttgtgcatgaaatcatccagggctacgccgcagccgcccacgccaagggcctgcagctgtatgcctgcttcgatcccaagctgccggaacgcctgatcggcgacgtaacgcgcatccgccagattctcaataacctgctcaataacgcggtgaaatttaccgactatggtcgcgtggtaatgcgggtcaaagtgctgggccgcgacggggaacgctccagtctgttgtggcaagtctcggacaccggcaaaggtatcgcccaggaagaccaggcgatgatcttcgagccgttttaccagagtgaaggcaataccaatgtggtcgccggcaccggcctgggcctgcctatctgccagcgcctgacggagttgatgaacggcaatatccgcatggtcagcgaactcggcctgggcagcagtttcagcctgatcctaccgttggaagaagcatctgttccaccgatgacaccgttgctggctgagaccatttacgtggcctcgccgatcccggaactggcaaacgcgatcgccggctggttgcgccgctggggcgcaagggcccaggccggcttgccgacgctggcggacacgcatctgctgttgcaagtgcaccccggcagcgtcgacccgttgctggtgcccgagtggcccgggccggtgattcacgtgagcagcaacgcctgccccggcgtagaagccgacgccggcgcctggcacgtcaacctcaaccacctgggggctattcatcaggccgtgagccaggcgcaagggctatgggtggcccgtgccgatgagcaaacgcaccggcgggatctgaacaaactcaacctgcacctgctggtggccgaggacaacatcatcaaccagctgattttgcgtgatcaactggaagaactcggctgcaccgtggagctggcggccgacggtcagcaagcgttgcagctccacaccgccggcaacttcgacgtggtgttgacggatgtgaacatgccccatatcaacggctatgaactggcgcgtgaactgcggcgccagggctgcacgttgccgattattggggccaccgccaacgccatgcgcggcgaggccgacctgtgcctggccgccggcatgaaccattgcctggtcaaaccctttgcgttgcgggctctattcaactccctggcgccttatgcacggatcacccatgaagccccttagtattctgattgtcgaggaccatcccctgcagcatatctacctgcagaacttgctcagcgagttgggagacttcctgctcgaaaccgccgaggatggcaaagaagcgctggagcgcctgcgccagcgggacttcgacctggtactgaccgacctgctgatgcccggcatggacggcgtgcagtttatccagtgcctggccagcctgcgctgcaagccggcgctggcaatcatgagtgcggcgtcgaggcgcatgctgatggcggccagcctggtggcgaaaaacctcgatgtggaagtgcttggcctgatttccaagcccgtaaacgccgaagccttacgcaccctggtcaaccaactcaggaacagggtgcgcacgcctacccccgaactgcccgagcacatggacatcgaccgtcacacgctggtgcaggccatgagcagcggccagttccaggcctggttccagccgaaaaaatccctggccaacggccgtatcgtcgccgccgaagccctggtgcgctggatgcaccccgaacaaggcgtgatgctgcctgccgcgttcctgccggcaatcaaggcgttcgaactggaggagcggctgttgtggctggtgctcaagcaagcgatccacgcccaagaacactggcgccagcgcggctatgaaattccggtgtcgatcaacctgccgacccacttgctcaacagccatgacctggccgaccgtttgctggagttcgtgctgcaccacgatggtatcccgggaatgatctgcttcgagttgatggaatgttcggtgccgcaggacatcagcaatttctacgccggcgcctgccgattgcggatcaaggggttcggtttgtcccaggatgatttcggcaagggctacagctcctacctcaatctggtgtccacgccctttaccgaactgaagatcgaccaggcactggtgcagggcagccacgacaacgaaggcatcgcccaggcattggcgagcattatcgcgctgggccgcaagttgggtctgacggtggttgccgagggcgtggagaccccgcagcaattggcgctgctgcgcaaaatcgactgcaatcaggtgcagggtttcctgatctctcacgcagtgtcttcggaccaatttcagcaactactgaacaatgatggccccgcgacatctcactagctggcggccacgatcataaggagtaagctccatccagtgccgatttatcctgcgcctgcggaaacccctgatgaagcacaataacgcgattctcgaagcctttacccgcagctcattgcgtctgaacaaaggcttgatggtgttgatgggagtcgcgttgctgctgatgctgaccaattactggtctctgcaccgaggcgtcgaaattcgctacagcgcaatgcgctttcactttgcgcggctgatggaaaacctcgcagaacagcaaacctacctcaagagcctgacacaccccggcatccaggccgaactgctgcgcgccacccacgtgcaggtcagccttaaaagccgcatggtcgacaaccgccgcacactgtacgaaggccagaagtattcgttttcggtgccattcagcgtcaagttcgatgaacagcagatcagcaccgccgccaggccgccgatttttgccctgggtgcgcacttgacaagctactacagcgccttctggtcctcgtcgccgtacgaggcaccgcaaacctttgtgctcaatcgccaggccgactacgccatcaccattccgtccgtgggctatcagcaccgggaaaaccccgaggataccgacaacccggtggcccgggtcaacgccgtgcagcaaatccttgcacaggcgccgcagccactggagcagaatcgggtgtattggcaggccggccccgaacccgagcatttactggcctacatcggcctgccactcgacgcccagggccaggctgtgatcggcaccctgctcgacgtgtcgcaggtcgacgatgtacagcgcgcgctgaatcactcggcgtttgatcgctttaccctgattggccctgacggcaaccggttgattgggccaaccacccaggcgcagctcagcgatggtgtgcatttcacggccgacggctttgaattcaaggtcaccgaggccggcgaccagccctggagcgcggtctatggcctgaactactcgcacttctttcactccgcattgtggccgttgagcaccatggcgttgctgctgttcagcctgattacactgggttgggctggcagccgatggtatcgacgccaggtgatcaccccagcacaactggcccacgaacgcatcgccgaaagcgtggcgttcagccgcgtgatcatcgacaccgcacctactgggttatgcgtggtgcgacgcagcgatggcaaggtattgatcgaaaaccagcgcgcccagcaatggccgggcacctcacgcctggtgcaggccatggccggtaagcacgatggcgccgagagcggtgagacgcacttggagatcgagggccggcacctgcagatcggctttgtgtcgacccgttatcaggctcaagacgtacgcctgtatgcattcaacgatatcacccggcacatcgaagacgcccaggccctggaagaggcacgtcatgccgccgatgcggccagcgaggccaagacgctgttcctggcaaccatgagccatgagatccgcacgccgctgtatggcgtgctcggcaccctcgaattgctcggcctgaccgacctcgacccgcaccagaaaacctacctgcacaccatccagcgttcgtccgccacactgttccaactgatcagtgatgtgttggatgtctcgaagatcgagtccgggcaaatggcgatagaagccgtggatttctgtccgctggacatgctcgaagataccttgcacacctacgccgccttcgcccggcgcaaggggttgcagctttacagttgcatcgacccgcagttgccgaactgcctgatgggcgacccgatgcgcatccgccaggtcctcaataacctggtgagcaacgccatcaagttcaccgactttgggtgcgtggtgattcgtgccagggtggtgggcagcgacgccaataatgtcgacctggaatggcaagtcaccgattccggcgtgggcattgccgaggcgcagcaggccaagctcttcgatctgttctaccaggcaccggacaccgccagcgaaggcggcaccgggctgggcctgccgatctgccgatggctggcgcagatgatggacggcgaaatccgcgtggtcagcgagcccggactgggcagcagctttaccctgaaaatgcgcttgccactgtgttgtggcgcactgaccaacctgccgctgatcgaacccagcccgacgccggtgtacgtgcaggcaccggtacgcgaactggcgcaggcaatgagtgactggctcaaccgcttgggcatcaccgccgcccgggccgcgcccccccaggacaaagacagtcaccacgcggtactggtagatctgttacctggcgagccccccaagccatgggccggccaacgtgtgctctgcctgcccggtgcgcacagcccgccgctgcacacggcgcaaggctgggtggtggatatgcacgacatacgcaccatcgccgccaccgtatcactggcgcagcacggcaggcacgagcaacccacggcgacccggccacaaagcgccgggcggctggagctgcgcatcctggtggccgaggacaacccggtcaaccaagcgatcatcaaggagcaactggaggcgctcggttgctcggtgagcctggctgccaacggtgaacaggcgttgcagttatggcaaccggaggccttcgacctggtgctgaccgacgtgaatatgccgttgatgaatggctatgaactggccaggaccttgcgtgagcatgatccacagttgccgattgtcggcgtgaccgccaatgcaatgcgcgaggaaggcgtacgttgcctggcagtgggcatgaacgcctggatcgtcaagcccttgagcctgcagaccctgcgcgaccagttgatcaaactgtgcaagatcaagtcgccggttgagcctgacgcccaggtattcgacgaccgcgtgcaactgtcggacaagatgcgcccgctgttcatcagcagcgtgcagcaggatgtgcagcgcatcggcgtggcactggtccagcgtgatgcccgcggcctcggccaattgctgcactcgatcgctggggccctgggcgcagtgcaggcgctcagcctggcccaggcctgcatcgaactggaaagcgcacttaaccgcggcagcctcgacacaacgcttgagctcaaggtgaagactgtgatgcagcgtctgtcggccgttctggagactctccagcccgggcactcttcactcacttgaactggcactacggacggccctttatgaaaaaattcaacgtggtaatcgcggacgatcacccgatcgtgttgcttggcgttcgcgaactggtagagcgtgacatacgttttcaagtcgtcggcgaggccgtgtgttcggccggcctgatcgagctgttgcagcatcaaggcgctgacatcgtgattactgactacaacatgccaggcgactcgccttatggcgatggcctgaagctggtggagtacctgaaacgacacttcccgcaggtacagatcctgatcctgaccatgatctccaaccacctgatcctcacccgcctgcaagagctgggcgtggtcggcatcatccagaaaagccagttgcataccgagattcaactggcactcaaggcgatcgcccaggacagcgactatcgcagcctggagccgccaaagacctcggtaatagagaccctcacggcaattgacgagcgctttaccagtttgtcgcccaaagagttcgagatcctgcgcctgtttatttccggcatgagcgtgagtgacattgcgcgccgccagaaccgaagttcaaagaccatcagcgcacaaaagatatcggccatgcgcaaacttgaagtcagcagcgaccaggacctacttgcttattgcctggaacgtaacatcttcaactaacgcataacttgcaagccattcctggacaatggctttgccctttattttcaagcctttcaccgctgcaacagcacaaataacctgcccaccccagcgcttataagaatcgtcttattcgctcccgccgcctcgtcgcctactctttgctcgcagttcaacaacagcaaacttttcaactaacacttacggacatcatcatgaagaagttttccctggctgtgatcgcctcggccattatcgccgcttccggcagtgcatttgccgtggatcctgctcctacgccaaccctgggcggcagcggcaaaatcaccttcaccggcgtgatcaacaacgacgcgtgctcggtggacggcgccaactccgaccgcaccatttcggtggacatgggcaacgtttcgatcaaggacatgggcaccgcggaaaacccaaccgcaggtcgtgtgaccgccaaagacttcaacctgaacgtcaactgcaaccagggcaccaaggtcgccatgatctttgacgccaacaacggcggttcgggcctggtcaccggcaaaaaagtactggccctgaacccgggttcggccactgcacaaaacgtcggtattgccctgctcgacagcaagggcggtctgattgacctcagctcgccaagcaccgcacgtattgaaagcaccatgcacggtgctggcactgaaggcggcgacgccaccctgagcttcgcggccgcctacgtcactaccgcagcggcgggttcgtcgaccgccggtcgcggtgacgccaccctgccgttcatcctgcaatacgaataattcggcgccccgggcaccgaacgcgcgaggccttgcggcctcgccattgtcttctgactacaccggataaccgtcatgccgcctcgttctatcgccgcatgtctggggctgctgggcttgctcatggctacccaggccgccgccagcatttcattgaatgccacccgtatcgtgtttgacggtgaccacaaggaagccaacattaccgtgcgtaatggtaaccaggatgtattgattcaatcctgggtcgacatgaacgacgccagcgccagccgcgcgccgtttgccgtcaccccgccactggcacgggtattcgccaaggaacaacaactgctgcgcattctgtatgaaggcaccggcatgcccacggaccgcgagtcggtggtgtggctcaatgtgcaggaaatccccaaggccagcgaggccgagaacaccttgcagttggccatccgccaacgcatcaagattttctaccgccctgccggtcttaccggcagcgcgctgcaagcccctgcgcagcttgaatggacgctggccaaacacggcagccaaaccctgttgcaggtgaaaaacccgacgttgtaccacgtgtccatggccgacatcaaagtgcaggcggtcttggccagcgactccaccatgattgcgcccggcgagcaaaaacagtttgcgctcagtgctccagttgccagtgggccggtgcagttgtcgttttccagcatcaatgactacggcgcgcagaatcactacagcgcgccgctgaccagcggcactgcgctaccggcgcatgcgactgaatcgcgcctcaacccctaagcactttcgctaacccacaggctcacttcgcgtgcgtgtttgcgtgcccggctgtccgtcaatcagggatgtcataggtcttcgcatgtcttttctttccagcaacaggcccgcacgtggcgtactgaagttgaagacgctgtcgctggcgattactgccagcttgcccagcctggccatggccgatgacgctgcgcaaaccttcaacaccaccttcctgcaaggctcgcagtcgccggtggacctgcagcaattgctctcggccaacagcgtgctgccgggcaattaccgcgtcgatttgtacagcaacgaagtgctggtgggccggcgtgatatcgacttcaagcgcaaccctaaaaacggccgcgtcgaagcctgcctgaccctcgacctgctcaagcaactgggtatcgacctgcaccgattgcaggccgagggcaaacttgacccgcagcagccgcaggactgctacgcccttgccgacatgatcgaagacgccagcgtgcgctacgacagcagccgcctgcgcctgctcgcgagtattccgcaggtagcgatgcagcgcggcctgcgcgggtatgtcgacccacagttgtgggacgacggtgtgtccgccgccttcatcaactaccagctcaacagcagccgcaccgccggcgactacaagacccgcatcgccaataacctgggcctgcgcaacggcatcaacctgggggcctggcgcctgcgcaacgagtcgaacctgagcggcggcaccgatcgctcgaacacctttaccagcaaccgtacttacttgcagcatgacgtcaccgcgatcaagggccagttcagcgccggtgagattttctccgacaccgacctgttcgacagcgtgcgctatcgcggggtcaagctcgcctcggatgatggcatgcgcgccgacagcgagcgcggctatgcacccgtaatccgtggagtggcgcagaccaacgcgacggtggaaatccgccagaacgactacatcctctataccgccaacgtcgcgccggggccattcgagatcaacgatatctaccccagcggctccaacggtgacctgcaaatcaccgtgatcgaagccgacggtacgcggcgggtgacgatgcaggcgttctccagcctgccgatcatggtgcgcgaaggccaggtgaaatacagcgtctcggcgggcacgttcaaaagcaatgccgatggcctggcctccccgcgctttctcagcggtacgctggcctatggcttgaccagcaacctcagtgggattgtcggtgtgcaagccagtgaggactacagcgcgctgtcgatcggcgccggcaggaacactgccttcggtgcgttctccctggataccacccactcgtccagcaaggctcaggggcgtacgtcccagggcagcagcgtgcgcgccttgtacgccaagacctttgccggcaccgataccaacttcaccctggccgcctaccgttactctaccgagggctatcgcaccctcaccgaccatgtggaagacagcagcgaagacctgcgcgtacgcaccggtcactcgaaaacccgcaccgacctgaccatcaaccagagcctcgggcgcaacagcgaatttggcagcctgtatgtgaacgccagcgaccaacgctactggaatcgcggcggttcccagagcttttccgcgggctacaccggcaattggggcgatctgagctacaaccttggcgtgacgcgcaccaagcagatcgttacctggggcgagccgagcagcgacacgcaggtgaacctgtcggtgtctttcccgctgggcagtcaggcccgcgcgccacgggcgtttgtcaccaccagccaccaacgcggtgacaccaccacccaagcgggcatcaatggctacgtggccgacaccagcgacactttctattcggtgcaggccggccacagtgacaccagcggcgactcaggctcggtgaacatcaacagtcgcaccgccgtggcagacgtcagcctcggttacagccagggccagggctacaactcacaaaacttcaacctcgcaggctccgtggtggctcatgcgggtggcgtcaacctggggcagacggtcagcgagaccttcgccctggccgaaataccaggcgtctctggggccaagatcagcagctacagcggggtggaaaccggttacaacggctatgcggtggtgcccactgcgcaaccctaccgggtcaactggatcagcctggacactcgcgatctgggtggcgacgtggaaatcaccaacgccacccagcaactggtgccgcgccgtggcgccatcgtggtggcgcattacagtggcactaccggacggcgggtgttgtttgagttgtttgatgcacagcatcaaccgctgtcgtttggtgcctcactggaagacgccaatggcaagcagttggcgattgcagatcccaatggtaatgccctggcgctggtggaagaggatcagggcacgctgatcatcaagtggggtgagcagcattgtcgtgccgcctatacattgccaccgcagaacaaggcgctgaactacgagcgccaggcactggtgtgtacgccttgattgtgcgggtgattgcgctactgtgctggccacgcgcctaccctctgcgagatttgcccatgcgtaacctattccttgccagtgcctgcctgttgaccaccgccctggcaggctgccagcaaacacccccggccaacgaccaactcgatgcagtgctctggacccagacgtccatcgaacacgagctgatctaccgccagctcttcgccaacgctacccgccaactcgatatagcgctggccgaccccaactgggacgcactgcctttgcctgcgcgcaagctgaccggtctgccgccggcggtgatcgtggatatcgacgagaccctgttggacaacgtgccgctcaacgctcgcgacatcatcaacaatcaggtctattcctacgatcgctggaatacctgggtcgagcaggccaaggctcaggcgctgccgggttccgtggcgttcctgcaagcggccaggcaaaaagggatcaaggtgtattacctcaccaaccgtgaacacagccaggtcgcggccaccgccaaaaacctgcgtttgcgcggctttccgatagagagcgacgcacagatcctggcggccagcacgcctaccggccactgcgaaagcgcaggctatggcaagaattgccgtcgccagtgggtcgccagccaagcccgcgtgttgttgatggccggtgactcgctgggagatttcgtgcaagccgaacacaacaccctggatgcacaacgcaaggccgtcgaaccctatgtgaattggctaggccagcgttggttcctgctgcccaacccgagctacggcaactggtatagcgcgccgtatggggatgatgagagcttgccgtttgcgcagaaacgcaggctcaagcagcgggcattgctgttgcagcaatagggtgaagctctgccatgatgatcgttcccacgcggagcgtacttacaccgccctggccgcaattgcctccacctccaccaacgcccccggcaacggcaacgccactacttgcaatgcggtgcgcgccggtttgtttggctgttcgggtgtgccaaagaactgggtatagccgcgctgcaacccggcaaaatccagcttgccaccggtctcttcggcgccgaccagaaacacccgtaactgcacgatgtcgcccaggtccaagtcatgttggcgcaggatctggcgcagtttgttgaacactgaaacgctctgcacctcggtgtcgccatacaccccaggcaccctcgggtcggcggggtccggcagcgtgccgctgacaaataccaggctggctgaggccggcacggtgacggtttgcgagatggggaattcaccgacgctggtgcgttggatgctgtcgctcatggtgtggctcctcaggatgcggccaacgccgcgagttggtgttgttgggtgatgcgctcggccagttgcgcgaccacatggcgcgccgagttggctgccgattcctgccagatgcccacgccgctttgcaccaggccgtcgccggcgaaatacacgcggccatggggctgttcaagcaa
